United States Patent Application Publication US 2025/0205292 A1 - sequence listing, part 12

SEQ ID NO: 18 - DNA, 2489982 bp, Bifidobacterium longum (residues 1-1,244,991 of 2,489,982)
  source 1..2489982: mol_type = genomic DNA
atggttaacgcttccggcgaccccgtaatcgaggccgcccacatctggtcagacacgctgacggtgctcaaacacagcgcttcgctcagcccacgagaaaaaggctggttggaaggcgttgttcctgaaggcgtcttcggttcgaccatcgtgctgtgtgtggacaacaacgacacgcttcaagccattcagggtgatttgaacgattccctgcttcaggcattgcgtacggtaaccggcgaaaatatgtttcccgcgttcaaggtcgtgccgaaaaccgagcccgaaccgctttcggaggcaaagccggcgcagccatatccttcggaaatttctccgactgtcgccgaattcggtaaagaatcctatggtgcaaagccggcagccgcaccgcgggaaccgatgcccgccaccgagccgcagttcccggtcggtcagcagaagatgaatcgcgatcccgagactcatctcaataagaacttcacgtttgattccttcgtgcccggcgattccaaccgttttgcccgtacggtcgcactggccgtggccgaaggttccgggcaggatttcaacccgttgtgtatctatggcggatcgggcctgggcaaaacccacttgctgaacgccatcggcaactatgcactggtcaaggatcccgggctgaaggttcgatacgtcacgtctgaggaattcacgaacgaattcattgacgcgctgcaaaacccgaaccaaagccagggtcagattgctgaattcaaccgtcgataccgacaggttgatgtgttgcttattgacgatatccagttcctcggcggcaaggaagccaccttggatcagttcttccatacgttcaatgcactgcatcaggcaaataagcgtattgtcattgcttccgatgtagcgcccaagaatttgaagggtttcgaggctcgactcatctcgcgcttcgaatccggcctgaccgtagacgtcaagccgccggatctggagacccgaatcgccattcttcgcatgatcgcctcgatgaacggctcgaaaatccccagcgatgtgttggacctcatcgccgaacgcttcaccgagaacattcgtgaactcgaaggcgcgctaacccgtgttacggccgtggcctcgctgagtaatcagccggtgacccgcgccttggccgagcagacgttgcaggacttcttcaccaccgatgtggaaatcaagcccacggacatcatcagtcaggtggcgaagtacttccacctgacgtttgaggatcttgtcggtaaatcacgaaccaaaaacgtggctgttcctcgtcagatcgccatgtatctggctcgcgaaatgaccagtatgagcctgatggatattggccaggtctttggcggacgcgatcacaccacagtaatgcatgcctgcactcgaatcagtgaccgaatgcagcaaaaacaggagatctataactacgttatggagctcacggttcgcctcaagcaaagcaacaccaactgacacaacgcttctgagagacgaaaaacggcactttttggactgactttccgaaaagtgccgtttttggttgctcaggcggattctggtggatacgtcgaggcaacggattcgagacattagattcctcatggctcccctttgtgaggggatctgtcggcgcagacgactgaggggagtttcgaaggggaacacgcaaaaaaaccatgaaacgagagaatcgattctgaggaccgattttgcgggtttgggcgagcgagacggaaaaagtgccgaaaacggtctccagaatcgattctcctcgacgaaaaacagtcttcaacacgccgtgcgaaagtgcgaaaaccaaaaaagttatccacatagttgtgcacagatgtgggtaaactcggcggataactcgtggattacccactattttgttgtggaaaactcgtgcataaccgcgacctcgatgtggaaaactcaaattcgacgaactggctgtggaaaactcgcccacttatccacaagccatgcagaatttgtccacaattttcagggacttatgaaccgttgcagttgtagggctcagccctacttatccacactatccaccggccttattatgtcgattacttactcagttacgtgaaaagcatcatcgccatagtaacagccggtcatccagcgtacgtaagttcgccacctaacggctagaatattcctcagccaatccgacgaagggaacaatcacacatgaaagtcgaaatcgataccgcagccctagccgacgccgtagcctggacctcccgagtcatcgacgcacgtccctccaacccgattctcgctggcgtcaagctggaagccattgacggaacgctgcaattctccgccttcaactacgagatttccgctcgccaccacatcgaagccggcgttgacgaagccggttccgtactggttcagggcaagctgctggccgatatcaccaaatcgctgcgttcggagaaaacgtacctggtcaccgacggctccacgctgaccatcacgtccggcaagtcgaagttcaccttgcagctcatgcccgacaccgagtacccggatctgcccgtggtaccggccatgctcggccaagtcgatgccccgactttcgttcaggccgtgaaccaggcgtgcgttgccgtctcccgcgaagaaaaccgcccggtactgaccggcgttcgcatgcaattccaaggcgacaaggtcgtcatgacctccaccgatcgcttccgtttggcccgcgccaccttcacttggactccgcagaacccggacgtcgacaccaccacgctggttcgcggctccctgctcaaggatgtggcccgtgctcttgacgagcaccagaacatccgccttgatttcgatgccgatagcccgacgctgctcggcttcgaaaacgccggccgcgtctccacctcccagctcatcgacggtgaattcccggcggtcgaccgcctgttcgccgacgaatatccgattcaggccgtagtcaacaagcaggatttgctcgacgccatcagccgtgtggctttggtcgccgaacgcaatgctccgattcgcatgaccttcaccggtcaggaagtggcgctgtccgccggatcggtcgacgaggctcaggccaacgaaacactggacatcgacatggatggcgacgacatcaccgtggcattcaacccgtcctacctgaaggagggtctgtccgccgtaaccgaaccattcgtgcgcatcaaaatgacgaccccggtcaagccggtcgagttcaatggccagcaggaagctgattccgacgagtccatggactaccgatacctgctcgtgccgatgcgctttaacaactgaaatccctgaatttccaacgattcgctaatgcacatctcccgtctcgcactcgaccactaccgctcatggagtcaggtagtggtcgatttcgtaccaggcgtgaatatcctgttcggcaagaacggtctgggcaaaaccaatctggtggaagccgtcgaagtgctgtccaccggatcgagccatcgcacgtccagcacgttgccgctgatcgaacgcgggcagaccacggccaccatccgcgcgaacgtcgctgatgatgccggtcaaaccactacgtatgaagcgtcaattcatgcgcgtggtgccaaccgagcccgcatcaactcggggtcgtcgctgtatctgcgcgatatcatcggcaagattcccagcgtttccttcactcccgaagatcagcggttggtgtccggcgatccgggagcacgccgcaccatgatgaatcaggctgcggctctgctcgagcccggatacatgcagacgttgcaacagttcacgcgcatcgccaaacagcgtgccacattgttgaagcaattgaatgccaatgtcaacaatggccagccgatggatgcggttctgagcggtttggaaatctggaccggccagttcatcgaagccggtgtggcgttgacccgtatgcgcgctcatgtgatcggtctgcttgccgagccatttgccgcgatttacgccgacttggccggtgccggcgagcaggtgacgctcacttatgcgccttcattcgacgaagtgctgatgttcgacgatccgcatccgcagattagcgagcatttccaacgcatctaccccggtgaagtggctcgcggcgtgaaccttatcggtccgcagcgcgatgacatgaaccttgagttgggcggtattcccgcccgcgagttcgcttcgaacggcgagatgtggacgatggcgttggccttgaaaatggcattgttcgaaatagtgcgtgaccggttgggattgcagccgattgtgattctcgatgatgtgttcgcccagcttgacgacagccggcgcacgcagattcttgatttcgccagaaaacaggatcaggtgctgattaccgtggccgctgaaggcgatgtgcccgactatgaatcggcccatcgcatcgacgtggccgcactggacgaaccagcttccgtgatattgccaactctgggcaatttgtccaattcgcgggaaaatgagagtttgggtgggtatgacgaaaaaaccgcggtggacagcgcgtccgtagaacggaaagtgtcatgaacccgccgatcgcccgccaactcaacctggacgagaccaaactgccggccgaaatattcgagcggctctcccgtcgcggggcgaccttgaaggactacagacgccgccgtgaagaggccatcgaaaacttcggcaaaccggggcgcgatccggctgaactgggcagcgtgatgaccaccatcgccggcaacggcgtctggacggcgaatatgaagcttgcgcaattgcgcaaccattgggaccaagtggtgggtcaggccatcgccagccattcggcagtcgccgatttcactgacggcgtactgaccatccgcgccgaatccacggtctgggccacgcagctgacctaccttatcccccaactcaccgataccatccgtcgcaatctcaaaggattgaccatcaccgagattcgcgtgaccggcccggccgccggatacacacgcaaatgggctcggcggcggtagccaagataccaaacaaattcgcagaagcctcgctatggcgctcgtcgggttagacgagtaaaatcacatgcagtatggtcaaatggctagaagagccctttacgggcctcgtaagccatatcacctccgtgaatgaccttcatgacggaggttgaccctgtagtcacggaaggaagcctgttggcagacgaaaccagcaaagaggagcagctgaaggcggctgcggaacgcatcaacaatgcggaattgaccgaaggcgaacttgacgaatccatggcccccgagcattatgaggcctccgatctgagggtgctcgaaggactcgaggccgtgcgtatccgccccggtatgtacatcggttccaccggcccgcgcggtttgcaccacctggtctatgagatcgtcgataactcggtcgacgaggcgctggccggatacgccagccatatcgaggtcaccattctgccggacaacggcatccgcgtggtggacgatggtcgaggcatcccggtcgatgaggtgcccggcgagggcgtctccggtgtggagaccgtgatgaccaagctgcacgccggcggcaagttcggcggcggcggttatgcagtatccggcggtctgcacggcgtgggtatctccgtggtcaacgcactctccacccgcgtggacatcgaagtgcgccgtcagggcttccactggacccagacgtacatcgaccagcaccccaccgcgcccttgaagcagggcgagccgatgaccgaaggcgagtccaccggtacgtctgtgactttctgggccgacccgaagattttcgagaccaccatctacgacttcgagacgctgcgttcccgcttccagcagatggccttcctgaacaagggcctcaagatcagcctgaccgacgagcgtgagaacgaccaggccggcgacgaggtggccggcgacgccgcggacgagcccggcgcaaagcaccagaccgtcacctaccagtacctcaacggcatcaaggactacgtcgactatctggtcaaggtgcgcaaggccacgccggtggaagaggacgtcatcagcttcgaggccgaagacctgaagctcggcatctccgccgaactcgccatgcagtggaccactgcctactccgaggccgtgcacaccttcgcgaacacgatctccaccaccgagggcggtacccacgaggagggcttccgcgccgcgctgacttcgctggtcaaccgttacgcgcgagacaagggcatcctcaaggacaaggacgagaacctctccggcgacgacgtgcgtgaaggcctgaccgccgtgatctccgtcaagctcaccaacccgcagttcgaaggccagaccaagaccaagctcggcaactccgaagccaagaccttcgtgcagcgcgtgatgaccgacaagctcggcgactggttcgacgcccacccggccgaggccaagaacatcatccagaaggccatcgaggcctcccgtgcccgtctggccgccaagaaagcccgcgagaacacccgccgcaagtccatcttcgagtccgccggcatgcccgacaagctcaaggactgccagtcctccaacccggaagagtgcgagctgttcatcgtggagggcgattccgcaggcggctccgccatccagggccgcaacccgatcacgcaggccatcctgccgctgcgaggcaagatcctcaacaccgagcgcgccagcctggaccgcatgatgaagtccgacaccatcgaatcgctgatcaccgcggtcggcggcggctacggcgaggacttcgacatctccaaggtccgctaccacaaggtcatcatcatggccgatgccgatgtggatggtgcgcatatcgccaccctgaacctgacgctgttcttccgctacatgcgcccgatgatcaccgccggctacgtgtacgtggccatgccgccgctgtaccgcctgaagtggaccaagggcccgcacgacttcgtgtacaccgacgccgagcgcgaccgcgtgctcgccgaaggcaaggccaacggacgccagctgcccaagggcgaaggcatccagcgctacaagggtctgggcgagatgagctaccaggagctatgggagaccaccatggaccccgagcaccgcattctgaagcaggtgcacatcgaggacgccgccgcggccgacgagaccttctcgatgctgatgggcgatgaggtcgaaccccgccgcctcttcatccagcgcaacgccaagaacgtgcgttggatcgatgcgtaacggaatcctccaacctccctcgtcagagggaggtacacaacggacttagacaactaaaggaacaacagtggcagatgaaaacaacaccggcgacgagcagttcacgccggacggctcgatggagccgttgagcccgcaggaggcggacactaccgactacggcctgatggacaccggcgaacgcatccagcgcaaggacctgcagcaggagatgcgcgagtcctatctggcgtatgccctctccgtgatcgtcgagcgcgccctgccggacgtgcgcgacggtatgaagcccgtgcatcgccgcgtgatctacgcgatgtacgacggcggctaccgccccgatcgcggctacaacaagtgctcccgcgtggtcggcgacgtgatgggtaagtaccacccgcacggcgactccgccatctacggcactttggtgcgtatggcccagtcctggtcgatgcgcaacatgctcgtcgacggccagggcaacttcggctcccccggcgacgacccggccgccgccatgcgttacaccgaatgccgtatggccccgctggccatggaaatggtgcgcgacatcgacaaggacaccgtcgacttcgtgcccaactacgacggcaagacccaggagccgaccgtgctgccggcccgcttcccgaacctgctcgtcaacggctccgccggcatcgccgtcggcatggccaccaacatcccgccgcacaacatgcgcgaggtggcggacggcgtccactgggcgctcgaccacccggacgccagccgcgaggaactgctggaaaacctgatccgcatcatcaagggaccggacttccccaccggcgccaccatcctcggccacaagggcatcgaacaggcctaccgcaccggccgtggcctgatcaccatgcgtgccgtggtcaacactgaggagatcaacggccgtatgtgcctggtggtcaccgaactgccctaccaggtcaacccggaccgcctcgtcgtctccattcgtgaggccgtgcgcgacggcaagatccagggcatcgccgacatgcgcgacgagacctccggccgtaccggccagcgcctcgtgctcgtgctcaagcgcgacgccgtgccgaaggtggtcctgaacaacctgtacaagcactcccagctgcagcagaccttcggcgccaacatgctggcgctggtcgacggcgtgccgcgcacgctgagcctggacgccttcatccgccattgggtgaaccaccagctcgacgtgatcgcccgccgcaccgcgtacctgaagcgcgaggccgaagagcgcgaccacatcctgcagggctatctgaaggccctcgacatgctggacgaggtcatcgccctcatccgtgcctccgaagacaccgacaccgcacgtacgggccttatggggctgctggacatcgaccaggtgcaggcggacgccatcctggccatgcagctgcgcacgctgacccgcatgaaccgcgacaagatcgtggccgagcatgaggaattgcagcgcaagatcgccgactacatcgacatcctcgccaagccggaacgccagcgcaagatcatcggcgacgagctcgacgagatcgtcgccaagtacggcgacgaccgccgcaccaagatcctgccgttctccggcgagatgaacgtcgaagacctgatcgccgaagagaacgtggtggtcaccgtgacccactccggcttcattaagcgcaccaaggccgacgaataccgctcccagcaccgcggcggcaagggcatcaagggcaccaagctgcgcgaggacgacgtggtggatcacttcttcctgacctccacgcacaactggctgctgttcttcacgaacaagggccgcgtgtaccgcatcaaggcctacgagctgcccgagggcgcgcgcgactccaagggccagcacgtggccaacctgctgcagttcgcgcctgatgagtccatccagaccgtgctgtccatcccgaactacgaggtggccaagtatctggtgctcgccacccgttccggcaaggtcaagaagaccccgctggccgagtacgattccccgcgccagggcggcctgatcgccgtgcgcctcatggccgacgagaacggcgagaacgccgacgagctcatcggcgccgcgctgtgcaacgccgaggacgacatcatcctggtctccaaactcggcatgagcctcaagttccaggccgacgacgagcagctgcgcccgatgggccgccagaccgccggcgtgcagggcatgaagttccgtaacgacgacagcctgctggccatggatgtggtccctggcgactccgacaaggacctgttcgtggtcaccaacgagggcttcgccaagcgcaccgccatcagcgaataccgtctgcagggccgcaatggcctgggtatcaaggccgtgcaactggtcgagggccgtggtgctctggtcggcgcgctcgtggtgtccgaagacgatcaggtcatggccatcatgaagtccggcaaggtgattcgctccaacgtggacgaagtcaaacgcaccgggcgcaacacccagggcgtgacctttgccaagcccgacaagggcgacacgattctctccatcgcccgtaacgaggagaaggacgagcccgaggatggcggcgatgccgcggcgaacggcaccgccgagaccgcacaatccggcgagaatgtgaacaacgcggacgaggcgtgagcagcgtcctgaaaagctggtagcctcgcatacagcagaggctaccgccaagcctgttaaggagaaacgatgagcgagaatctcgaagacaacgagccccggatcataccgccggcagtcggcaatacgcagaacgagcatgtcgagccgctgatcggtactgagcacgctccccgcgtggcacgctccgtgtccagcgatccggaagaatccgcgttgccttcttcaggtgccgccactcccgtgcgtccggcacctcgccgtagcgcccccagggctcgccgcatgagcttgtcgctgacccgcgtggatgcttggtccgtggccaaggtgacgttcatgctgtccatcgccgtggcgattattcaggtcgttgcctccgcgatcgtatgggtgctgcttgatgtggtcggtgtattcagccagattacgcagattgtgtcttccaccggtcttgatgcaggcggtttcgatctcaagaacgtgttgtcccttaccaccgtggtctccggcgtcaccatcttctcgattgttgaagtggtgatcttcaccctgctggccaccattgcggcactgatctacaacgtggtcagctcgctggtcggcggcgtgcacgtcacgctcggcgacgactgatatagctatactggcagaactcccctcagtgaaccgcaccccggttgttggactgaagtaattcagattcgatgatcggaggtgcggtttcttatgtgtggggttcgtaggcgtcgttgctgggccgagacttgggactccggcgacgctgggggtggcaggcgtcggtgttgggacaggttttgtatctctgacgacgctgtggagggcttaccgtcgtcagcggtacagatcttggagttctgccgacgctgagggtgcgttctgtgtcgtatgcgtccaattcttggccctctgccgacgctgggcccagcaagcgtcgttgctgggccaagttttggactgccgccgacgcagagaatgcacacagtggtgttggtctgccagcgtgtggcagcttggcgccgctggggggggtcatgagtcccattccaactcccccttattgaccacttaggggtgcatcccaacacatggggtgcacccccttttttcttgttgtgctacggggttccagtcgcatttttttcggtgatattttgaacgcgaagacaggctgggaaatgcccgatagtcgtgttcccctcagcaggtgaagccctgctttcaggctgcaaaaccgactcgggtgttccgaaagcggctttcgttgttgtacatcgatacataagagagaacacccatgaaaaacaccattattcgtgctgccggtgtgctgttggctgcaagcatgatatttggcggtgcggcagccactgcatcggccgcggaagcaacgtcgccgagcaccggcaccaccagcagcacgcaagccgcggaatccatcaatcgcgaatgggtgctgaatcctgcgaacaacactgagctggcggctctcggcactatacaaggcggatcccagacgttcgacgggctgaccatcgatgccactgcaaacggtgccaagtttgcgccgcgcgccaatgacacccagatcaacgccggaaccatcatcagcatcccggtgccagcccacaccaatacagccaccatcacccttgcgttgtccggcggcaccaccactattaccgcggatgccggtgaagtgagcagcgacaacacagttatcgccttgcctgctgcggagtcggctcgtacggtaaacgtcaccttcactgcccagacctatctcaacggcatcgcccttgccgaacagcagccggaacccgagttccccggtacgcccacggtcgcggccaaagacacgaactgggacttcacggaaaccggcatcgatcgaccggccgtgcagggcctaccgacaactaccaaggcgtcgccatcgacgctcgggcgcaaggcgccaagttcaacccgcgtactaccgcggcaagcggcggcagcgatactcaggtgaacgctggaaccatcctgtacattccggtcgcacaggccgagggcggcgctacagtcaccgtgaagggccagctgtacggtcctacgctcaagctcgacggtacggacatcaccaccggcactgctgtaaccatcgcaaccgacagcacgcgctacgtgccgctctccgttgaaggcacgggcagcctgtacctgaccggcatcgccatcgactacgcggccggctcccccgccgccaccagccacacggtcaccgtgggcccgaacggccagtaccggaccattcaagccgctctggatgctaacgactcttccgaaaccgaccgactagtgctgaagatcactccgggcgactatcgcgagaagatcaccgtgaccaagccgggcgtcaccttcgccaacgccgacgtgaccgccaagcgcgcggtgacgattcgcgccagctactattcgtccaacacattcgatgccgacggcaagtttgtgccgcaggatgaattcgaccttggcaccaacaagtgcgccaccgtgaccattggcgcgggtgccacaggtttctccgcctacggcatcaccttccagaacgattacaacgtggtggatcacacggcggcgggcgagcagacgccggccgtggcgctgaacacccaggcagacaaggtgtacctgaagaacagccgcatcatcggccgtcaggacactctgtacgtgcagggcgccggcaaccgcgtgtacgtggacggcggctacatcgaaggcacggttgatttcgtgttcggcgacgccaacgcctacttcgccggcaccgagctgcacatggccgcgttcgccggcaagaacaacggctacttcaccgccgccaacaccaagaagtccggcgtgggcctggtgtttgaccgctgcaacttgaccgttgccgcagcatatgacgacgatgccaagctttcgctgggccgcccgtggcagacgttcgcgcagtacacgcaggtgcgtaagggcgacggcagcagctatgtgaccggcgtggatttgggtacgaagaactcggcgtatacggacacttcctcggccgtgacctacctcgacagcacgatgtccagcaagatcaccaagaatcgttggaatgtgtggaccagcaagaaccagagcggcaaaagcgtggacgtgaccttccacgatgatgtgcgattcgcggaatacgccagccacgatgaaaccggcgcgctgcttgatccggctgattataagaacgtcgtgctcggctcgatgactgctttggatgaggctcaggtgcaggcgaagcgtgctgaattgctcgcggcactgggcttcggctcggcggctggtcagtgggttgtgccggatggcgcgtggccattcgcttacgacccgaactactcgaccggcactgatgtgcagccgactcagccgggcggcaacgcctcgcctaacgcggattcggcggccaaggccgacaccatgccggaaaccggctcggccatcattgcggtggttgtagtcgccgtgccgctgctcgttgctggcttggcgctggtagcagtgcgccgcaatcgccagcagtgattgaaagcgttgctgcgaaccggacctggtgaccttgtagacggggggctatctccgttgaaagaggtacattgatggctttgcagaaagccaactgctttcaaaggggtacctgaaccacgaaacctcgagtataagcgttgcaatgacggcgtttatactcggggtttcccatattcagtacccctctgaatgcagttagcttggatcgatgatcatatccaagaattcactcgtatagtggtgcgtaatgcttacgtatttgggatagcacttgttgctcgttgtacatatagcaatgcccttgcctcctcacggggaagcaagggcattacgctactgcttagtactgcttagtattgctcagcactgctcagcgattgctcagcggcaagcgtcacagcacgccctgggcaaccatggcgttggcgaccttgacgaagcctgcggcgttggcaccgagcatcaggtcaccctcgtgaccgtattccttggcggcggccagggagttggcgacgatttcttccatgatggacttgagcttggcgtcgacctcttcgaaggtccaagacaggcggtagctgttctggctcatctccaggccggagacggccacgccaccggcgttggcagccttggccgggccgtacagcacgccgttcttctggtagacctcgatggcctccggggtggacggcatgttcgcaccctcgacgaccacggtcacgccgttgtccacgagcttctgtgcggattcgccatcaacctcgttctgggtggcgcacggcagagcgatgtcgcccttgacggtccacacgcccttgctgccctcgtggtactcggagcccggaacgcgctcggcgtattccttgatgcggccgcgctcgacttccttgatctgcttgacgacctcgacgttgatgccgttcgggtcgtagatgtagccgttggagtcggagacggtgacgaccttggcgcccaactgctcagccttctgagcggcgtaggtggccacgttgccggagccggagatcacgacggtcttgccctcgaaggagtcgttgcgcagcacgcgcagggcttcctgggtgtagtagcacacgccgtaaccggtggcctcggtgcgggccagggaaccgccgaattccagacccttaccggtcaggacgccggagtactcgtcgcggatgcgcttgtactggccgaacaggtagccgatctcacgaccaccgacgttgatgtcgccggcgggaacgtcggtgaactggccgatgtggcggctcagctcagtcatgaaggcctggcagaagcgcatgacctcagcgtcggacttgcccttcgggttgaagtcggaaccgcccttgccgccgcccatcggcagcgtggtcagggagttcttgagaatctgctcgaagccaaggaacttgacgacggactcggtcacggtcgggtggaagcgtagtccgcccttgtacgggccaatggcggagttgaactggatacggtagccgcggttcacctgaaccttgccctcgtcgtcaacccaggccacgcggaacttgatggtgcgctccggctcgacgatgcgctccagtacaccggccttctcgtactccgggtgcttctcgacaaccggctgcagggtctcgaagacctcgcgaacggcttgcaggaactccggctgatcgccgtcacgggcaacgacctggtcgtagacacgcttgatgtactcgtcagtgagcatgattctcctcgatttgctagggaattaagacggttttattctatgcgcgcaggcccttgctgcatagagtctcgctcggataacgggaaagctatcggcgtggttatggggtggttcaagtttccgtttgttagatttttcggcgattgctggatgtctgtctgtgcgtgaatcgggtcgaaatggaagctgcatcacaccgaaggtgcgttcatatagtggacataaaggtggacttgggtgatgtcggatgtgcccgttgggaatcgtgcgccgtaggggccgaggtcttcggcgcgcaggttaccgggttcgcggtcagtgcgcgaagtaggtctgcagaatcatcgtggtctcggtgcttaccggcaccgtgcggtggatgagattgagcaattcctcaagggcggtgggggaggccacgcgtaccaccagtacgaagctgggggcgccggccaccgaatagcaggagacgatgccgtcgatattgttcagcttgtccggaatcgaggattcggctgagtagtcgagcggggtcacgttgacgaacgcgctgatgggcaagccgcgctgctcttggtcgatgatggccttgtatcccttgatgatgccgcgcttctccagcttctgcacgcgcgactgggcggcggagacggacagtccggtcgcctgggccagttgcgcgagcgtggcgcggccgtcggcctccagcatggtgaggatgcgctggtcggtctcgtcaatcgcggtcatggtgtcttctccgttcgttgtgctctgtgttcactgtacctgttgccggaatgcgatggctttccgattttgcctggtaatttcagtagttcttcctgtgttttctgttgtgtggtggaatgtttatgcctaaagtcctaattgaatgtaataattccttctaaaataagagaacgacgaaataattccattgaggagggatgatatgcagaagttttccaacatgcctctgtccgaagttgcatctgctgctgtgcctgctgccagacgggttgctgtgccgaccgccaagcccgcgagcttgtccgccgaagccctgaatatcccgcgctccggcatccgagacgtattcgaccgtgtagagcgcgtgcctgacgcgatttcactgaccgtgggggagcccagcgccacggccgcgccgcatatcgtggcggccgcttgcgaggccgcacaggctggccgcactcggtacaccaacgtgctcggcgtccccgaataccgcaaggccgtggccgattactccgcccgtgtgaagggactcacttatgatcccgaaaccgagattcaagccgttgacggtgccacgattggcctgtttctggcgctgaaagccgtggtaggcaccggcgatgaagtgattattccctcgccgttcttcacttcctatgacgccgaagtgatgctgtgcggcggccgcccggtcaccgtggcgctgcgtccggagcacggcatgcgcgtgaacgcggcggacatcgaagcggcgatcaccccgcgcacccgcgccgtaatcatcaactcacccggcaatccgaccggcgcggtaacttctgccgctgaactggcgcgtattgccgaagtatgcaagcagcacaatatttgggccatctccgacgaggtttaccatccgttcgtgtttggggaaacgttcggggaaacgcttgggggagaggcagccgtggcaccatcgattgccgcggtgccgggcatgaaagaccgcaccattgtggtggaaagcctgtcgaaaacctacgcgatgaccggctggcgcatcggctacctgctggcacccgaagcggtcatcgaacagaccggtaaaatcgccgaactcatgcactcctcggtgaactccttggcgcaatacgcaggcgtggcagcactggccggtccgcaggatcatgtggccgccatgcgcgaggaataccgcgccaagcgccagatcgtgctggacggtctggccggatgcctggtattgcgcttgattgaaccgcaaggtgcgttctacgcctttgtggacgtacgcctgactggccttgactccggtgaattcgcagaccgtctgctggacgaagagcacgtggccgtggtccccggcgaggccttcggcgaggaggggcgcggcttcgtgcgcctctcctacgccggagatgccggcgagctgcgtgagggcgtcgcccgtctgcgcgcattcgccgaacgggtatggaaccccatcaccggacaccacaccgccacttatcaccccatggaggtgttggcctgaggcttaaagcgaggctaggccgccaattcagactcgtcggcgcgagcgatggcctgctcgtaatccttggtgcctttgaacacttccttggtccacgggttgatgccctgcttcttggcgcgtagcaggatgtagccaagtgccagcacattggccgccaacgcgattaacgagactgcaaggttcacattcggattgttcacggactgggtggagaacatggaatagtcctggaacatcgggaacacctgcgcgaacatgcaccagatggccagcgtgttggcgcggttctgaatccaaccgcccttgttccagaagaagttggccacggtgggtgccagcagcagcgccaggccgcaataccaggcgtgggtgggcaggcagttgtaggtgtagcagaagttccacaggtcgtaggccacgatgaacacccaggtcatgtccggccagagcatgtcgtccttcttcttggaggcgtagatgccgaaccagccggtcatgcagaagatgttgagcaggccggccacgccgttgaagacgttgtgccagccaccgtacagggtcacgccttcggtggagatccacgtggtgccccagccgcggatggcggattcgaagtcggacactacggcaatgaggatgttgatggccacgatcacgaacgggaagcacttgaaccagtgcgatttgccgatggatccccacttgtatttgagggccatgaaaccgatgcagccgatggtggccgcgtacagcttggcatagtggaaccagctggtcatgtgtacgtaggtcgggttgttgagggcccagtcggcacccatggcggcggccgtgtagatggtgatgaagtagacggtcagcacggccggtatgacgaggaaggcgataacgccaccggttttggtgcggcgggccagttcgttggcgccgataagacagcagaagacgagtatccatccgatccattggtagatggcgttgtcgccgtagacctgaaacagcataagcggtcctttccgtgtgtgcgctgtgcgcctcgcagtcctccattgggttgctgagacgcctatagacgccgctatgttgacgcagcgtcaatttctctcacggcacagtctagcctcaagttgacatcgcgtcaaaacaaccgcattaaggctgccgcgtttcgtatcgttacgcgtaggggctggctgaggcgtaatgctgaagagtaacattgaagcaatggcaatcaagccgatttgaggaagagaagcacacgatggcgtactgcggccactgcggaaatagagttgataggccggcacgattttgcccggcatgtggagcgtctgtagacagcgcaccggttgcgtctgtaccagtgccggccgcatcgtcagccgtaccgactgcgtcgataccggcacctgctgtgccagcgccttcagtaccaccatcgataccagccgcgccggttgccccatcggtttacgccgcgcccgctgccccacagccggcaccaactgctcccttgccagctttgccgattcccgctcctgccgcatatcaggcgactgatgcaaccgccgtcctggcaccgccgcgcaaatccagcaagaagctgatcgccgttctctgcgcattgcttgcgacgattctggtggcggccttggcattcatcgtccccaacttcaccgccgtcaaagcgatgctgggcttccagcccaccaatccgctggtcgtcaccttcgacgcgatcaactcgctgtccactctgcgcagcaccaaatacgaactcagaacctacagcagcactgacgactcccttgacgcgcggatgtctggcatgtattcgctggggcaaaaccaccaatgactcctccgcgtctgtgaccatcaagacagatgaacaggcaacaaccctcgcttggcacaaaggcgcattcgccgggaaaaacgtttggtatgatgacgacccctactacatctactacccggccgaccaatatgaagatgacttaaggaacggcgttggtagtgatgtggcggacttgatattgaacgtcaaggatgcgttggtcaagaacggtgcttgggacatcaccggcgcggagcgaacgttctacgatcagctggacaagatgaacgacgatgggtactcgaacgacatcgaccgggccaagggcacgaaaacgtctgccgagatgaaggccgaggccagcaaattcatccaacaatatctcggcgtggagctggaagataagaatgtgcgcagccagctgttcccgaatacatcgtctgccaagtctgccggcaacacgcagctctcgtatcaaatcgatgtcaaggcattggcccagcactttgtgaattactggatcagccatgaagcgcagtatccgcatctgaaatcatgggtgattcagcagatcgaggataccggtgtgggcgatgctgaaggcgagtaccgtcaggcgctcgacaatgtgcgcaactgggacttcggcacggatgaagagccggatatgccgactatcaccgtggatctgaactacggcaggaagcatctgatgagctcgattgccgtaagcgtgtccggcaaggacgaatacggcgactcctacaaaggttcgctgtcgttgacgctcagccagcagaacgcggtgtctgtggacgaccccgatttgactgatacggtgagcaaagccaaggacaacaacgagctggatctgtcttgagcagaatcagaatgtgcggaacgccgtgaacagatcatcgacgtgacgtcgcatgtgattcacagaacgggttttggggcttttccgttcgtcaggtagccgaagcatgcggattgaccgagccggcggtcatataccatttcaagaacaaagtcggcttgctgattgccgtgctggagcatcgtgatcgggaagacatggctacgtttgcccattctcttggcgttgaacctgaggatatgtggagcggcaacgcgcagttcggcattcgtgatatctgtgctgcccttatggagcgcaatgcggctcagccagagatggtgcggttgtatataccgtgctacaaggcgaatcgttgaacgagcatcatcctgcctatgagtattaccaaaaacgagaacatcgcgtgatggacaccttaacccgagcagtcgagcgtgacggtttggcagatcctcgtcgcgaggcgcggactgctttgtcgatgatgaacggcattcgggtccgtttggctcagggatcgggcatcggtcgatttagtggccgattggaatgcctatgccgacttccggtggcctcgacagtcgtgaggcaataagacttttctcgtgagatacgctatcggcgtgtcgtcatctttttgttgcaatacgcagaaaatgcaagaacaaaaacccttggaatcggactgattccaagggttttgttgtgtctgtggagctagccgggttcgaaccggcgaccctctgttagcattctcagaaaacccatgggagagcaagatcatgcatgaatcttcaaaaggttgaaatctagccgtttttagaagatttgcagcctatccgagaacgcattgaaatgcatggaatcccatagtcatgtctactgaatgtctaccaatataaagcaccgccccgagctatcggggcggtgtcctgtctggctgcgctagctgtgttgcaacgcgggggtacgtccttgcggacgaagttgcgtatccaccaaactgaggtaacggcggacgcgtgctatcgaatagtcgtgctcggcggctaggtctttgatcgatctgccggactcgtattcatcccgcagcagtttccctacggccagctcgctttccctagtcagccgttcgtggttctccagcgggggcatgttctcgatctcccctcccgtgtagcccttgtacaccttgccttgcggagtaacggattcgtctgcctcattgccccaagctgaccaatgtggctggggatagcgggcaaacatttccaagtaggggccgggcgaacagctcgttatgaggtcgtactgctcatccggctttcgcgagtgttcgcgtttgcgtgtctcgatcatgttcacctgacgccgacctgcgtcaagggtgcgcatatgccccttcacgccgaaaagcagaagctctgtgacgttgcggaagtagaaaccgacccctcgaccgtctggcccgccatccttgcgacgcttggcccagacgatgttcgacacgtagcggaacccccatgcctgcatgacctcgatgccttcgggcagcaaggcattgggcacccagagatacaggtgggcgtctttcgccgttatgtcgtcaactggcaaggctttgatctcatccagagacatagtcccatagcgccccagacgcttatgctcgggagctacctttcccgttcgattctggaaacgccatggcggatcggccagaatcgtcttgaagccacctgccgtggtggggagtggtgcgtacagttcttcagtcaccccaacagaataacacaaatagatctttaaatagatctttttggtgccgtgtcgtagttctatactgtgttcatggcgttcacgacacactcctacgacgatcccgacgtgctggcaagcggcatccgttcccgctacgagttccatgaggtacgaagcgcctgcgctgtgatgaaggcagtgtcgcccgaagagtgggcagatatcaccgatgtgctgggcagtttcagcttctccgcgaacttgctgctcagggcaggcggcaacaactccgagatggcggagacactgaaccgcgcgctgcgggagcggggatggaaagaatgcgcctacgaacttgagacgaaaggcaggatcacattcagggaatcgggcgtgccggacgaagacctaggcaccatgagcgaggcttcctattgggtggacaatcggaaaggccgtgtgcttgtcgatatcgaatggaacgccaaggacggcaaccttgatcgtgatcttgcagcctaccgcgcatggcatgaggccggcctgatcgacgctgcaatgatcatcaccaaacaccgtgaagacctgctcgacaaagccatcgagttatgggcacctcatctgggtgcgaccattgacgaagtgtacaaggcgacgcgcaaagcgcggaaggcacgcaccgaggaagacagacgactggcattgccgctcgacttgacaaccacgaccgtcacaagccttaccaaggcgatcgatcgaatcaaccgaggcgaagccggtacatgcccggttgtggcggtcggtatctcgggggcaacgtgggatggcaccccgtacagggaggtataggtgctcattccttgctgagttgctcggaggctttgaataagtcatcttcagtattgacggtgatctcttcctttacgagcagccccatctccggatgctcggtgccgagctcgcccgcctgaagttccccacccttcaacatgcgctgatttgtactgatccttcgcagcaacgcgttgcgtttttctcccgtacgctcggggtactgtttgcttagcggttcattgctgatgatccagaccgtcgtgaaacatgccacatggttgttgtaccgtgctggaagcatgacagggtaacgatccaagaaaaccaagagctggtcccagctgaactggctatcgaactcatctagtaccaagatcgattgcccctcgtactcatcccacggatgccgataatcggtcacgcggtagatgttctcgatgggattgttgtcatatatgtatttcgttttcccgacacccggatcaccccacagataatgcacagtgatgtcgcgaagctgacgaccatatttcacccggtcgcgcgctgtcgcaagttcggaaaggtaccgagtgtagcgagcagcttggcacgcgtcgtcattcaacaacacctccgagacgctggcgccgtccatgatctgccgacgtagctcagcgagatcggaacgactgccctgctgatccttcaggttgatttctcctccccgccagggaccgtctacacgtgtctcctccttggaacagtaatcgacgcaatcctgtaccgtgcccttgcgcatttcgatgtgcgcgtcgttgaagccggccttcttgaacttgttcttcagcgtccccatatggacgggagtctgaagttgcaggaatgcctgaaaatgagggtagtcgctcttgcctccctcctcctgctggaagatgtatgcccccagaatatccagcagttcctctacgtcctgccgcgtgtgtttttcggcagagatcgtcaacatccagtcgcgcgcagtcgatggcatttcactccttcctgttctgctcaaaagttggcgggagtaacactgcccccgccaagccgccgcaagcggcggcacgaccgccgaacgcttcgctgaagctacgcttcggcggtcgcggaaagcccctgcagggtctcgtcgtcaatccaatccacgcgaaacagttgggatttctttgcggcggagttccacaaccagcctgttcccggcgaagcggcggagatggcccaaggggcggcgccaactcggagtgcggctgaggggagcatcatctttgcctccgactcgcccatgcgcatagcgatcgtctgaccgttgaagtcatcgcgaatcggaatcgcctccttgcgggggttttggctgaagccccagaccaaattccccgtcgcgcgacccatgccaaggacagctgtgagatcgtgctggaactgcttggaaacctttgcgtcctgtctgaacagctccgcgagctcatcgatcacgaggatgtttctagggttatccggcgtcggtgtgtgcatccgggcacttccggccatgtcccgtgcacgttggttcatggcattacggaatgacgatacaagttccgctgcggattccacatcgatcgcgaccgtctggaacattgcgcggctcatgcttagttccatcgccttcaggtcaatgccgtacaggcgaaccagtccagcttgcgcaaacggttcaacttggacaagaagatttgcaaggacggaccctttcccggaatcgctttcgccgatggtgagcaaatgccgctcgcaccaatcgatataaacgggacagccgttggtatcgacagcgaggcagatgctctccaaggtggaggcggggcagcgtccgaaccaccgccccgcaaactgtagtcccacggctacatcctcctagtgcgttgcacccacgtgaaacgtcggtgcgcgattggctcagctgtctcgtctggccacagttcgttgacagtcatcgcgccgcgtccagctgcttcctcttggttgcaccattcgcgcggccatgcgatgtagtgaccgccaagtcgcttgccgtagcgaacaagcttccgatcttcatcctcgacctgctgggtgttcttggtgcgtgcggcgatgatgtttttcgtcgcgcggatgtcccttgcgatcttggcgacgatggcacacgccaccagtgcagcaatgagagcgagccaaccccaccaagggatgctgatgccggcctcattcattggagtgccttcctgtgttggtgccagcggacgcagactccacgccgtcggcgacgatggtgaatcccaggtcgtccacggcgtagggggagagcagcacgcggccagtgagtcggagctgggtcatctccgggatcgcggcggagggacgctgccggacgaagacactcaccttgtcgcggatgcgcttgcggcggcaatctcggacagccacgccggggagtttgtagacgagaccaccgaagcgctcgtcgtcaacgcggtgctgcttgttgctgtcctcgtccttgacgttcctcgtttttggggccatgtcgtccacttcaatctcgtcgagcgcgacgaccgaaaccccatcgggaatcaggtcaaacaccgcgccgcggagttccttcatttcgtcggccattgtgagtacctccttaaggttggccgttactggatcacttcatgaacattgcgcgcgacgaagtccaccaagtcgctctctcgatacaggactttcctgccgagcgtcacatacggcaggtgggagttctcgaacctccagcgagccagcgtcttcaccggcacatgcagtatggtcgccgcatctgccggggtgaggagcgttggcatctcggagtgtgtcgcgtttgtgttcatggttttagcctgccggaatcaacgtaggtatcggtaggggaatgaacataatccgtagttttgcggtatcatgcatatatgagcttgacaaacgatcgagagaagtatataggtgcctgtgttcgacgggcgcggcatcgatgggcgcctattgacagagatggcaaaattagggggtctcgcgaggacttggcgaagagagtcaaggaacttgtgccgaatagtcttgtcacagccgatgtgcttgaaaacattgagactggccgtacgcgactaaaactgtctgatgcgttagatatagcgattgccttgggggtgcctctcgtgaacttgtttgtggatgttcaaaagccttttgagaacaatcctttgttcccggatgggaaaactaatttgcagatctatgatgaacaacgtctagatgatttcgaattgcaggcagaagatacagattttaaaaaagcgggaaggctattggctgatactaacaagctccagtggatgctaaaggcctatccggttcatggtttagtcgatatttcagcagtagctgaacataaatatcggatggcattgagggaatggaataatagccagttctggatttatacagataaaggacgttttagaatgggtgggtattctaaaacaccacaaccgaaacgtggagaatattcagcaacaaaacaggagcaggttgaactatctctaaaagtattcaaggtgcttgtgaacacggttaatgatattgcaaagaatttgaattggttaggcagatatgcgtattgcattccagatgaaatggctgaccgaatactcgatgctgtagctgaggcagggcgttgtgttcagtcgtttgacgtagatgccatctcggtttctcagcctaaatactgggatgtctcctttgaagaactcgttgcacgtgtgaggaaaagcaatgtcgaaagcttggattgaagacctctggctgaccgagccacgggagtgtttgtgttcaattagttgttgcgggtttagtcacgatgatttttcgggtttaggcagagcatgccgaccacggaatggtcttaactggatggtgcttgtatctccgccagaaaggaccggaaaggattatgatcagcatgccccaagtacagtctatccgtcgtttgcggcggaacggggaatccgtcgcgtcgatcgcgcggaaaacacatgtcagcgagccgacggtgcgtaagtacctcgcgaaggaggattgtcggccgtgccgtcggtgagaaagccgcgcgcgtcggtgatcgacccgtatctgcccgtgatcgagcagtggctcgcggaggatcgcgcgaactggcgcaagcagcggcataccgcgaccaggatctgggagcggttgagggacgagcatggcgcggaggtctccctgtccacggtgacgcgggcggtggcgcggctcaggcgtgagttcgcggcggagcgtgatgaggcgttcatggatctggtatggcatccaggcgaggcgcaggccgatttcggcgaggtcgacgtgctgttgcgcggcgtggtgcagcggatgcatcatttcgtgcttgatttcccgtattcgaacgtcggtctggtgcagttgatgccgggcgagaacgctgagtgcacgtgcctggcgttgcgcaacctgttcgagtggctgggcggtgtgccggagcggatcgtgttcgataacgccgccggcgtgggccataaggggtacggggagcgcgagccgcgcctgacgcacctgttccaggccttccaggcgcattacgggttcgattgttcgttctgcaacccgtattccggtcatgagaagggcgcggtggagtccaaggtcggcatggtgcggcgcaagctgttcgtgccccggccgagcgtatggagcctggagaactttaacgccgggctgccggaccggtgcctggagctggccacgaaaccgcattaccgcaaggacacggaggaacgtggcctgttctccgaggaccgtgcggcgctgctgccgttgcccgggaagcgtttcgacgtggtcacgtggcggcatatgaaggccgaccggtacggcgtggtcacgctcgagggacggcatcgttattccgcggaccgggcgaacgcgggcagaggggtgatcgtgggcctccgcgcgctcgaggtcgaggtcctcgactcgtcgggcaagcatctggcgacccatcctcgggcgtacggccaggccagcacgaacagcgaggacccgtccatgcagttggcgctgctgtgcaacaagcccgcgtcctggcccaacagccgggtacgtgacgcgttgccggacccgttgcgggaatggctggatcggcaggacagacagacacgcaacgaggcgctgcagaccctcaaacgcgttgacagggaatccgggtgggcgaacgcggtcgaggcgatgctttccatcctcgaatcgaccggcggggcggaccgcgccggtgtcacactgctcgcggccaggctcgccgagggcgtggcgggtatcgaatacgacgatgacaggccggatctgagtgaatacgacatcgcgttcaccgcggacgtcggcgtgcaggaaggcgggcgatgaacacgaagacggacgaagggctctacgagaaggcccgcaagctgttcatctccaaggcgagcatcgacgaattcgccggctgggccacgccccgccaggtcgacgccgtccaccgcctgctcgacacggaactggcgaacagggaacgcgcgaagcacgacaggctcctgcgccgcgcccggttccccgtcgtcaagggtctcgacggctacgacttcacgaacgtcaggctccccgacggctacatgctcgatgagctcctagggctcggtttcatcccgcgcgcgcaggacctggtgttctacggcaagaccgggcgcggaaagacacatctcgcgatcgggctgggcatgaaggcgatcgacatggggctgggcgtgcggttccatcagaccgccgagctcgtcctccagctgggcaaggccaaacgcgacggcacgctcgagacgatgctccgggacatcggccgtgccgacctgatcatactggacgagttcggctacgtacccttcgacatcgacggggcgcgcctgctctaccagatcatcgcgggcagctacgaaagacggagcatcatattcaccacgaacatcgagttcagtaaatggggcacggtcttcgcggacgacaaactcgccgcagcgatcatcgaccgcatcgtgcaccacgggcggctcctcgagttcaccggccagagccgccgcgtcagtgaggccctcatgttcggcaggaacacctccgcgcaaccggaaaaataaggaaaatgcatgcaactgcctaaacccgaaaaaaatacatgactaaacacgaaacaccgacttgacgaaatacaacgggagacgttgcccgatggcagcaaggtgaagattccagttcccagttctgtaacgaagagcttggccgcgtatatgaagacgccggagaaggccaaggtgcccgggaagtttaagacggcgcggtatggacacgggaagcgatggcgggtgtcttggtgggcaaccttgcccgacggttctaagaagcgcagtagcaaggcattcagcacccgagccgatgccgagtcgttcgcggcagccatggaggatgatattcgctcaggtcggtatgttgatccggccgatgccgacaggccattccaatcggtcgccttggaatggctcgcatccaagaacaacctgcgcggtcgtagctatcttcgatatgagaacgacatgacccggtacgtgcttcctaagtgggggatcgcccgatcggtagtatccaagaatcggaagtcagcgaatgggtacatgagcttcaatcaggaacagccccgcacgagttcaagcgtaagacgaccatgcagccgatgaagcggcggacaatcaaaggcgtagtgaaggatgccttcggcggtgtgatggcctatgcgtcttcgcctaaacggcgatggatactgtctaaccccgctgccgacgtcgaacttccccaagatgccgaaaccgacgatcgggtgttcctctctcatcagcaggtggcggatatcgctgaggccgcagcgcaagttgacgtcaaaaacccgatggtctccaagctgctcatcctcttcctcgcatatacaggcctgcgggccaacgaagccttggctcttcgcatcggcgaccttgacttcacaaggatgcgtatatcggtaacgaagacgatcactgctgacaggcaggggcgcgaaatcgaaggcaaaccaaagagcgggcgcaaccgtatcgtgcccatcccaggtttcctgactgccgatctcgaacaggtctgtgacggtcgcaccgatgacgactatctattcactgcgctccacggtgggatgatccacttgaacacatggcggacacgcgtatggtacccagccaaagaaggggcgggctatggcgacgtgaaggggctgagaatccatagcttgagacacacgtatgcctcgttcgccatcggcgcaggttgcgacgtgaaaacgcttcagagcatcatgggacacgcctcggctaccgagacgctgaacacctatgccgagctgtggcctgatcgtattgacgaggtggcggccgtcatggaggccaagtaccagcagtgggaagctcagcggcgagagtagtaggtactaacggcctgtcaggtactttagtcatgtctaccagtgtctactgtttggtgctgaggcaaaaagagatattcccttgaaatcgttgagattccaagggaatgaaggtggagctagccgggttcgaaccggcgaccctctgcttgcaaagcagatgcgctaccagctgcgctatagccccgtgagaaaaaaagagcggctcgcggccgcttcatttttcctgtgggcccgggaggacttgaacctccgacctcatccttatcagggatgcgctctaaccagctgagctacgggcccgatccatacgcttcaaaagcgcacaagtgattacaataccattgaacggcggtatgtcaataacggcgtgtcgcgattgtcgcttgcgccatgattgccggcgcagcggagcatgacgagtgcgatgaggctgttcgcgtggtggaagccgtaggccatgcggatggtgaccttgatcctgttgtcggacgcctcgagcctggcgttggagtagcccagctcgatggtcctgaggatgtcgggccacgacggcggatcttccgggatggcttgccgctctcgtacaactgcacgatctgccgtttgaacgcctcgtcgtagtggcggggatgtttcgggtcggccatcgtcggcctccaatctcatgtcattcgtccctcatcggactgtctaatacgttgtagccaatccacggcgtcacatcgtcaggctgtccgggtcgaggaggaaatcgtagacgctcatcgtgaggatgccgtgctcgtcgcggacgggtttgaccacgtcgcgtacgaggacgatcttctggaagctgtcgtcgatctcgagcagcgaggcttctcctgcgcgaccttctccggtgtgggcagttggtacgcggattggtcagggcgccgatggaggaggccagcacgtcgaccaggtcgtcgagctcctgcgacctgcgcagcccgttgcgcatgcgcagcagcccgttgatcaccccgtacagacggggcggctcctcgccgcgcgtacgaacgcagttcatgaagaattacgagtgattcgtcgaagtcttcggcgttacggccgccgcctgagccagggcggcggccacttgttcgttgacggctccctgctgtgcgatggtgacgcggatgcctcgactggcatgcgcgtccacgcccgcaccggcccccgcgtcggctccggtggcgtcggcgctgatacgcaggctcggcaggaacggcttgccggcggccacacggatgccctgttcggccagcagtcgcagcgccgccggctcgtcgcgcaccggaatccacagattcagtccgtcaccggtatgcacgtccaaactttgacgcagcagcagcgcgtgcatcgtcttttgccgggtggcgtagatatgccgggcgttggtcaccgtgtggaacgcctctttgtcggccagcatttcatacagaatctcttgcaggaaccggctcacccatcccgatcccaagcgtcgttgggcgataatcgcctccacggcatcctccggcccagacagcgcagccaagcgcagatccggcccgtgcgacttcgaaaaactgcggatatgcaccacgtgttgcggcaatcgttgcgccaacgatgtcgcatacgcattggccacatcgccactgtgatcgtcttccacaatcagcggcataccaacgccattcgggtagtgcgcgagcagcacgtccgccaaagcgtcgatgcgttgcgggctgaagctggccccggtagggttctgggcgcgcggctgcagcaggatcatactgacctgatggccgccgtgcggcaccgccagacgctgcgattccagcatggtcagcgcacggtcgagtgcgtcgggcagcataccgaacccgtccatcggcacgccgaacgccatcgcgccatgtgcctcgatcatgtcgagaatcagcggatattccggtgcctcggtaatcacaaaatcacccggctgaacaaaagcgttcatggtgtgcgccaaaccgtcgcccgcgccggatgccatagtcatcgcctccggctcatacggccagttgcgtcgcaaaatctgttccagcatgggcaggatggtcggcccgtcgtatgaattgacgaatgccttgtgcgtgccgagcttgccgagaaacgggcggatgtccggcagcagcgaaaggtccggcgtgcccttggacaggtcgataatcggtcggtccggcgcggtggccggggcttcggccagcaagtcgccggcatcgtagcgatgcgtgcgcgactgccgcagtacgaatgttccggcgcgcccgcgggagcgcagtatgccggacctggcgagggcatggtaggcactggagacggtggccggactggtgcgtagcagtcgggcgagatcgcgtacggtgggcatgcgctggccttccgcaagtatgccggaggaggtcagcgaggtgaccgattcgacgatgcgttgcggggtggccgtcgcctcggtggtgaggatgagtgaggataactggccggcatcaacggccaggtcgtcggtggaacgcaggggagcggccgtaatgcttggctcatcgttgtagccgacggcatgtgcggttgttgatgcggttgatggcgatggcgtatccatgatctgcctcccggatcttggcggcgagcgtgatgagcgcgcgtctgcgtgaatgttgccgattgccgccggctgatgatcgatggcggttgccggcttgttgctggctgcttgactgccgatagtaacggtcactgtggcaacggtagtcaaatgttagcgccgcattgtgcaatgagtatgtttttgaataacataaacattacataatctggatacaattattgttcttgttcctatgtttcaaaatgatttcgtattcgccactactgtaacattattaaatgttcgagtttgacgcgaaatgttcaactctcataatgacattcacagcgcgttgctgccctgacccgatccacgggagacggcatcgggcacttcgagaaaatatcgaggaaaggacacatcatggggcatgatctttcgcaggatgcggaaatctgggacgacgcttacaagctggaccgcgcacacgtattccattcgtggcacgcacagcgcaacctggatcccactgaagtggtaaccggtcacggcgtgtggctgaagtacggcgacggccgtgaaatgctcgacttcaccagccagcaggtcaacgtcaacatcggctaccagcacccgaaggtgatcgagggcatcaagaagcaagcggaactcctgtgcaccgtcggacctgactacgcgaacctagcccgtggccgcgccgcctccctggtggcccgccgcgctccggaaggcttcgacaaggtgttcttcaccaacgctggcgccgacgccaatgaaaacgcgatgcgcgccgcccgcctgttcactggccgcgacaagattctgtcttcctaccgctgctaccacggcaacaccggtgcggccatcagcgccaccggtgactggcgccgtaagcccaacgactactctcgcggccacgtgcacttcttcaccccgtacctgtatcgctccgagttctccgcaaccacccaggaagaggagtgcgagcgtgcgctggctcacctcgagcacgtgatccagttcgagggcccggacaccatcgccgccgtgctgctcgaatccgtgccgggcaccgcaggcatcatcattccgcccaaggactacttcaagggcgtgcgcgagatcaccaagaagtacagcatcctgatgatcaccgacgaggtcatggccggcttcggccgcaccggcttctggttcgcactcgacgactacgactacacgccggacatcatctccttcgccaagggctgcaactccggttacgtgcccgccggcggcgtgattatgagcgacccggtggcccaccgcttcgacgacatcgtcttccccggcggcctgacctactccggtcacccgctggccatgggcgccatcgtggccacccaggaagccatggaagaggagcacatcgtcgacaacgcctacaccatcggcaaggacgtgctcggcccgcagctcaccgctctgtacgacaagcacccgaagatcggcgaggttcgcggcaagggcgtgttctgggccgtggaaatggttgccgaccgcaccaccaaggagccgctggacgacgccacgatgaagcagatcgtggccgaaggcgacaagcgcggcctgattctcggcgtgcacaacaaccgcatccacgtcactcctccttgcgtcatctccgccgacgaggcgacccagggcgtcgagatcctcgaccaggtgctgatcgcggccggttgctgattgggtgactcaatggctcggtgacggtttgtagccgttgccgacagcaccgttcattgctgatggcggcccgttcggaacgttaggttccgggcgggccgccatcgttgtccgccgttgtgcgagaatgacttgcgtgccttatcgccgtcgtcaatccaccgctccgaagtccggtgcgccgaaatccgttcggtccgctgccgccgggcagtcgttggatattgatggcatccatctgcacctgacgcgcaaacccatcaaaaacctgtatctgcgcatcaaaccgccgagcggccgcgtcgaaatctccgcaccgatgcggatgagcgagagtcgcattgcggatttcgtcaaagagcgacattcgtggattctcgcccagcagcagcgcatggctgaggcgcaacggcgctccatcatggcattgaacgagggcgccggcttcgagaacggaggtcgtggtgtagctggtgccagcggccatgatggaggcgttgccggtcgtccgaaaaccggtgatatcagtcgtccgggaattggtgacgccgggccaggccaagccggtacgaatgtccaaccgtattttgaccgctcccaaatctggaccgacgaacgcaaacgacaagcggcggccgcgatcaacgccgcgttgccacagctgctggccaagtgggggccggtcgtcggccggcagcccacgcatatcacgctacgggtcatgacctcgcgctggggatcgtgtacaccgcgaaccggccgcatccgtctgaaccttcaattgggactgatggaaccgcaattcctggaatacgtcttggtccatgagatgacgcatttgtgggaaagcggccacggtgccggattccagcgccgcatgaccgcctacctacccggctggaagacgctgcgccgcgacctcaaccgccgcgtggtgctgtgacgatgacgggtcaggcttcagtgccggcgatgtggctgatggcctgatcggattcgttcgcatggtccgaatgcgccaccatctcgatggccgccggacacccgctcaccgacgaagaccgctggccttggctcgacaccatcgccgcgtggatcgacgagcgcgtggccgccggcgagcccgccgtggtcacctgctcggcgttgaagaagatctaccgcgacaagctgcgccgtcaaggcgtggtgttcgtctacatgcagggcacattcgacgaggtgatggaacgcctttcccaccgccaaggccacttcatgaagccgagcatgctgcaatcccagtccgacattctcgaagagccgggcgatgacgaaattcacgtcaacgtacacatcggccaggccgatcccgaacacgaggccatggccgtggccggtgccctcggcctgtgagccatctctcggctccccttagtctcacttcgccacacgtgcggcgcatcgacgaactcgaacggcgcatcagcgaacttcagctggagctgaagcagtgtgaaggccagcaagggcgaaccggatcggtccaaacgggctactcaggccgaccagcccagccagtccgttcagaccgacctaactgatcagagcgggccctctgaccagtccgaaccatctgaccgacatgtacttgttgactaagtgtgcggcccgtcattcgttatggaacatgccggccatgtatacaggcaggtaggttacattcccttcgactgagacgttgcacgggccaagcacatagcctgtattgagatggtattcagggtgggcgagcacgttgtccattgcgcgatggcgtttgtaggatttgccggacttcacctcaatcggcagcacgtgatcgttgcggtcttggatgaggaaatcgagctcgccaagcttcttactgttgtagtagtacaggtcaaatccgtgagcgcgtagctcttgggccaccgcattttcatagattgaaccgtagttgatatcagggttgccgtcgagtacgtcgagcgcggttttcttgagaaacgagccggtaagcagacccacgtcgttgtaaaagagtttgaagaggttacgttccttgctcatctccaacggtgtgcacggttcgtccacgttgtacgcggcgacggctacatccgcattgaccagccaatcgaaatcggaagcaaccgattggaatctcatgttcttttcgattttggcgaaggtaaagcgcttgtttgggttatttaactcgctgggcaccaaatcgtagatagcgcggatatgcagccggtcttctttgcgcgcgtattggctgatatcgcggcgatattcacgctttatgttctcttgtatagtgcgcacgtccgcaacgctgccgtttgccacgaacgagtcgactgcggcaggcatgccgccgatgaccagatatttggagtatagctccatgagcctttgatgaatgaactcatccacttcctggtgcttggcaaagcattcggcaagcatatcgaatacgtcgttgccgatatgctgcgaccagcagaactcttggaaatccagtggatacatatccagctcggtcaggtacccgaccggtaccgagcgtatatcttcgagctcgactccaagtagcgagccggaaagcgcgtaatcgaaccgaccatcatctacaaggaacttaattgcggtgaccatttccttgcaacgctggacctcgtcaaagaaaatcagggttttgccgggtactaatggcgtatttacggccagttccagcctcatcagtaggtttttggcatcgcggggccgatcgaataatgcaacgaggtcagggttctcgatgaaattgagctcggcgatatggtcgtaatgctgttgggcaaagtgcctgatgatataggttttgccaatctgacgggctccggtgaccagcagtgcagtgcgtttcggcgcggatctccaagcttccagctgtgtctcgatttttcttcgcagcatgagaatctccagtcatttgtaggccttgcatctatgctgggcacgttttccaactgtttatagcgcatattttacacttttccaaccataagaatgcggttttggctacgttttccaacctcaaaatggggagttttatacacttttccaacttatgtatgtggagactctctatttcacgtgagacgaaagtggctcccctctttgaggggagccacggaatactgcttttacttatgccaggtgagagcgcatgaaccactggaacttttcgagttcctgcacgtggtcctggatgatgttggagctgatcacatccagctcgtccagctcggcgatggccttgcggtcgtcggcgatgaaggcgtcatagtactcgatcagcgccttgagatactcctcggtgcccacgcggccctcggcgtcgaacgacttccacgtgcggttgcgcacgatggcgtccgcgcggccgtccggggtgccgcccagagtggcgatgcgctcggcggtctcgtcggcctgagccagcacggcctcgacctcggggtcaagcatctcgtgaacggcgatgaagttcgggccggtcacgttccagtgtgcgtgcttcaggaccagagcggcctcctgctcctggctcagtcggttctgtaggatggcgatggccttctcactggccgcttcatcaaggcccggcacaacaaacgcaagtgtcataatgttccttctttcagtaggtggaacctgtccatataattctacgatttttggttatgccccgggccgaacgaataggtggtgaatatcacgtggctagttggcatcgtcgctttgtgattcggctggcagtggcgcatggtccggggcaccggctttgcggacttcgatggtttcgatgcggcggccatccaccttggtgatgaccatgttgtagccgtcgtcggaatgcagcacgtcgcccaccgcacccatcttgccggtcttggacaggaagtagccggcgaccgtctcgtacgggccgtcctccaattcgatgccggtcagatcggcgaagtcctcaatggtcatgctggcctcgatcgtggccacaccattgacgaacgcggtgcgggtggtgcgttcgccgcccttctcgctgggcagatcgtactcatcgcgaatatcgcccacaagctcctcggtcatatcctcaagcgtcacgatgccgtccgtgccgccgtactcgtcgatgaccacggccagatggatgccgcgcttacgcagcagttccaggctcggcagcagcttggaggtgccgggcagggagatgccttcgcgcaccacatcgcgcacgatcttggcgttcggatcgcgcacgtccagcagatcgcgcacatgcacgaagccgatcacgtcgtcgaaatccttgccggtcaccgggtaacgggagtacggctggtcgcgtacgaacgcggcggcctcggccaagggctggtcgccctcgatgaagaccacgtcggcacgcgggcgcatcacctcggcgacgatggtttcggacgcgtcgaacacatcgtccagaatcgtgcgttcgtccttggaaaggttggtgttggagctgaccagcacgcgcagctcgtcgtcggacacctcggactcggtctgctgcgggtcgaagccgagcaggcggacgatgccgttcgtgttcttgccgatgagccagatgatcgggcggcagacggcggcgaaggcgtcgatggcgggcaccacggcgcgcgcgatctgctcggtgcgctgcatggcgatgcgcttgggcaccatctcggagatcacgatggagcagtaggagatgatgagggtcaggatgatgttcaccaggccgccggcgatgccggggtgcacgccccagctttcgaccaccggaatcaggtagggggcgatggaggaggcaccgaacgaggcggacaggaagccggagagcgtcacgccgatttgcacggtggagaggaaggtgttcgggtcacgtgcgattttggcgactttggcgccgcgagcatcctcctgctccatttgctcgatctgcgagccgcgcagagagaccaatgccaactcggtgccggagaacacggaaccgataacgagaaatacaaaaatcaggaggatgttcaaaccaagtgacatggcttcaactctaggggagtggcacgtcaaattggggtgtgctggctgggcagtaagaaactcggcaaagggaagggcactcttatcattactgcggccgacgtgtcgaccggtgtttccgatgcgttgctcgccttcgacgatgccgtatgcgctccagcgctggacggcattactagtgcagagaggctgtttctcgcggctatggccaaggattcgccaaatcccacgcaggttggcgatgttgcggatcacacgctcagaagctcagcacttctactttgccggaatcgagctgatagcgggcgccgacgatcatgagcttgtcagcggcgagggcctgctggatgacaggagactgctccaccaaagtttcaataatgtgggccacatgcacgcgctcgatgtcttcatgcgcgtcgagctcggcttcgcgcgcctgccagacggacatgccggcctggcgcagaataatcgattcggcggcggcgatgtgctcgtcgaggtcgtccatcgcatccgcggcctccagtgagccgtcggcttcggaagtgatggtgtgcatcaggtcgtccagctcctgctcggcggcctcgattgcgccgcagtgctcgtgaccgagcacacagatcaggctgacgtgcagtttcttgaccgcgtactccagcgaggcgataaccgcgctatcgatgagttgcccggcggtgcgcacggtgaacaggtcgcccaggccctgatcaaaaatgatttccggaggtacgcgcgagtccgagcaggagagcaccgcggcatccgggttctggccatcaagcaacgtttgacgggtctcctgatcctgccatggatggtcgggcttgccctcggcaaagcgccggttgccttgcagcatgcgactccacgttgcgtttgcggtcgattcctgttcaaagtctgactgagccatgaaacctccattatcagcgggctgctgattgccatattagcgagtattcgcgcatagtcgtgattggggcaacggccatttgggcacaagggttgcgggtggtgtgataaggctcatacgttacacccgcgcgagccgtggctcaccacattacgataggtggtggtaaacgcttgaagattaacaattcccgaaaggaccgatgatgactcttctgcagcatgaactgaccgatttcaaggtgaacgcattccagaacaatgagttccacgaagtgaccaaggacgatgtgctcggccactggtccctgttcttcttctacccggccgacttcaccttcgtgtgccccaccgagcttgaagacctggccgagaactacgccaagttcaaggaaatcggttgcgagatctactccgtctcctgcgacacccacttcgtgcacaaggcttggcacgacgccaacgagaagatcgccaagatcgagtacccgatgcttgccgacccgaccgccctgctggccaaggatctcgacacctacaacgaggccgatggcgtggctgagcgtggcgacttcatcgtgagccccgagggcaaggtcgtggcctacgaggtcatctcctccaacgtgggccgcaacgccgaggagctgctgcgccgcgtgcaggcctcccagttcgtctacgagcacggcgaccaggtctgccccgccaactggacccctggcgaggaaaccatcgagcccagcctcgacctcgtcggccagctgtgatcgacactgaataggcggtaaccttggctcccctctctgaggggagctgtcgctgaaagcgactggggggagtgctcgcgagagctagcctgatccgatatgctcccctcagtctcactacgacagctcccctcagagaggggagccagtgtatgtaagggagttttcatgactcagaccaacaatctctatgacgtcgtcgtcattggtggcgggcctgctggcctgacggccggcctgtacctggcccgcgctcgctaccgcgtgctgattctcgaaaaggacgatttcggcggccagatcaccatcaccaacgaagtcgtcaactatccgggcgtgggccgcaccacgggccgcgcactcacccagaccatgcgccagcaggctcaggacttcggtgccgaattcctctccgccgaagccaccggtctcgacgtggatggtgacatcaaaaccgtgcacacctcacgcggcgacctcaagaccttcggcatcctcatcgccaccggcgccagcccgcgcaagctgggcttcgagggcgaggccgagtacgccggccgcggcgtggcctactgcgccacctgcgacggcgagttcttcaccggcaaggaagtactggtggtcggcggcggattcgccgcagccgaggaatccgtgttcctgaccaaatacgcctccaaagtcaccgtgctcgtgcgcgaaccggacttcacctgcgatgccgcagtggccgccgaagccaagaacaacccgaagatcgacgtgcgttatcaggtcgagctgaagggcgtcaccgccggccaaggaggcctgcgagaagcctcaatcctgaaccttgccaccggccagaccgaaacgtggaagcccgccgacgccggcaccttcggcgtcttcgtgttcgccggctatgtgcccgccaccgatttggtgcgcggcgtggtggagctcgacgaccacggttacgtggtcacgcacgactacctcagaacctcggtgccgggcgtgtacgcggccggcgatctgcgcgtcaagaacctgcgccaagtggtcaccgccacctccgacggtgcgattgccgccgtggaactggagcgatacgccaagcagatgagcgagaaaaccggcttggtgccgccgcgtcccactgcttccgcttatgaggagtccgaggccaaggccgcctccgccgcctcggccgctgacacgacgcccgccccggctcccgccaaacgcagcgccgatgccgcagccgcagccagcgccgccaagaagcccggcgaactgttctccgccgccgtcaagcagcagcttggcgtggtcttcggacgcatgacccgcccggtcacgctcgctctcgaactggacggcactccgctttcggcggaattgcagggtttcatcggcgagatggttgcgctgtccggcggcaagctgaactcggttgtcgttgatgccgcagggctgatcacggcggtggatggtgcttctgtgcctacttctttggtggtcggcgaaccgctgtccgtcaccttgccggacggcaccgaactgcccacttatggttcgttggacgattccggccgcgccacattcgacgtcgccggcgtcctgccgctcgcccgcccaactgtgcgcatctgcgtgccggctgagggcgacggcaaggccggcaaggacggcaatggttcactggtcttcaccggtctggtcttcaccggtctggccttccacggcgtaccttccggccatgagttcaactcgttcgtgctcggcctgtacaacgcggccggtcccggccagccgctgggcgacgacctgatcgaacgcgcgaagtccatcacagacccgctgaacatcatgatcctcgtctcgctcacctgcacgatgtgtccggaaaccgtgcttgcttcccagcgcattgcctccctgagcccggccgtgcgcgccgaagcctacgacgtctcgcacttccccgaacttaaggaccagtacggcgcgatgagcgtgccctgcatcgtcatcacccacgccgacggcacccagcaagtcgaattcggcaaaaagagcatcccccaaatgctcgaactggtcggcgcgtaagccgcacgacctcaggtactcaacagcaacaacaacgattctgccaaaatcgtgacgtacatcgattgatgcgatcgatgcgcccgactccggcagaatcgttgttttgcggcagctcagcctcggtcttcgacggccttcgtgacgtttctgtcgccgaggtacttgaccaagctgatgctgatcagggccacgacgaacaggccggtgattaccggaatcagcgcggcgtagcggtgggcctgatcaggcgcgtgggcaactacgaacgaggccaactggttgccggacagaccggcgaacgcccaggcgctcagcgtcagaccgtgcgtggtggagacggttttggtgccgaagtgctgatcaagcagcacgggcagcgtcgagaaaccgccaccatagcccgcgttgacgaggaacagcatggccagcacggcccacagcagagcgttgccgatgctgttggtgaagatctgcagcaagcacacggcaatcgacatgatgaagattacctgatagacggtctcgcggcgcttcaggtggtcggagagtgtggagaagcccacgcggccagccgtgttgaacacggagtccacggcgagcaccagtccgatgatgccggagatggcggcggcaaacttggcggggctcaggttggcatactgcgggaaggccctgagcacatcgtgcaggatgtccttctcttggctgatgagggccaggccgcaggtgatgttgatatagaaggctatccagatgccccagaacacgggcttcttgaggattgtcttgcggctgacgtgtgaggtcgcgggatcgtacacccagccggccggacgcttgatgagcaggaagccgacgaacatcatcaccgcgtagaccgcggcgaggatgaagaacatgctgaccaggccaaccgtgccgatgagatattccatcagtgggctggcaatggccttggccaggccgaagccggcgacggcgatgccggtggcgaggcccttgttgtcggcgaaccaaagcatcaggttcttgaccggagtcagataaccgacgcccaggccgatgcccatgatcgcgccataacagatgaacacgcccggcaggaagttcagggcgatgctcacgcccgtgccggcgaagccgaccacgaagcagaccatggagacgagtgcggatttcttgatgtttttctccaccattggcccggcaaacgcggcggacatgccgaggaagaagatggcgagtgagaagccccattccacggaggcggggctggcgtggagacggtcagcgataagctgcttgaacacgctccagcaatagacggtaccgattgggatatgaatcagcagtgcagggataatcgcgctggtccaacgattctcggtaaaccttgccatatatgggcggatcctttcgtaactggtgtacgatggcctgccggcccgaacgagagtcgtatcgcccatatccacgcacatcacgacggcatgcccccgtgaaccatccgggctgcacgaatcgaatcaaatcgaatcgtgcgaactgcgaacaattcgctaaacatccttggtgtgcatttcatcggcgctgctggctcttgtcgacgccgacaaacagaactataacgctgttatggggttgctgtggctgatttctgtggtcggaagctatgagctttctcacatcgaaaacagttatatgacggtatcggcgtgattgatacgtgacgtctgcccgtggacgcggcatatccctctcggaaaacaatgactccgtcatgtccatttcttggtttgacatgttttcgtttgcagcgtcggtgctcaccacggtgaccgcggcgttcgagtcgccgggcagggcctcgaccgagggtctcatcctcggctgagatgtgggcggtactatggattcttatcgataaggttcgtgatatgcggagatggtaacgatggtgaccttaaaggatgtcggcgaactggccggagtgaccgccaccaccgcctccgcggccctgcgaggcaaggattacgtcaagcccgaaaccacgcaacgcgtgcgtgacgccgcccgcaaactcggctataaaatcaacctgtctggccggtccctgcgttctgggcggtccgataccatcaccttccttacctcgggcctcgagggcgactatttctcccatctggccatgtgtgtggctgaggaagtgcacaagcgcgactcgcacatgctcatcgaactgtcccggtatcttaccgacgacaacgatctgtcgtacacgttttcggacggcatcatcgccatcaatgcgccacgtgcggtcgatatcctgaagcggcacccggccgtcatgctggaaaactacgacaccagcctgcccgtcgacaccgtgaacgcgccgagcgacgccggctcacgggcggcaatcgaacaccttatcgcgcgtggctgtacgcgcatcggcatcgtcggcgacaatcacgatcccaacaatcccaacatcattcccggctcgcgtgatattcgtatgcgggccgccaaggagacgattctcgcggccggactgccgtttgacgagcgccgtgatttcatcaaatcctcgtggtcgattgacggcggtatcgaggccgggcgcggcttggctaagaaaggcaagtgcaagtacgacggtctgtactgcctgaacgacggtattgcgctcggtattctgcgtggtctggcggatgatggcgtgagcgtgccgggcgatgtgcgcgttatcggcttcgacggcctgagccagggtgcgtacagcgtgccaatgctgaccaccgtggccacggatttcaagggcatggcggataccgcgctgaccttgcttatgcggcgtatcgagaacccggacgatgaattcttcccgcagaccgtgaacgtgggctataagctcatcgagcgcgaatccactgcggcgtgaaatggcgtgaaacagggaagtcccactctggcgagtaggactttaccgatatgcgcgggtaaaaggaaacccccgctgagtcgcgggggttgctgtgctgcgatatgttttgcgcgcgcaaagctattgcgcaaaacatatcgctacgttttggccttgggaagcccaccgggcttcccaagcggtgttgggccgcacgcgcggcccaacaccggccaaaacgtcagcctgtgttctgcaggccagcggcgacacctgaaacggtgcagaggatcagatagatgaaccctgcctgctggctttgcgagagctcttccttgtccaccttcttgcgcagcgacctgagggcgagcacctgggtgacggacagcgcgtccacgtacggggagcggatgcggatggcctggccgagcacgtggcggtgctgcagcggccacttgtcgcccacgatggccagaacccacttgcgggtgagctccatctcgttgagcaccttctcattgaggtcctcgcggtcgccgagggcaaggtacatcctggcgatgcgctcatccgtcttggcgatggacatctcgatgttgtcgatgaaggtggagaacagcggccattcctcgtaagcctgacgcatggtctccagatcgccgaacttctcgcatgcggtgccgagaccgtaccaggcggccaggttgatgcgggcctgagcccaggagaagatccacggaatcgtgcgcaggtcgtcgagcgacttggcgccgaggccacgcttggccgggcgggagccgatcggcagcaggccgatttcggtcagcggcgtaacgatcgagaaccacggggcaaagccgtcggtgttcaacaggtcgaggaagcggttgtgcgcggcctcgtcgagctgagcggccatgtcggcatacctctcggtcatctcggtgttgcgcttctccacgctcggcgcggactgcagcaaggtcgccgcagccacggactcgacgtggcggatggccagcaccgggttgccgtaacgggcgaagatgacctcgccctgctcggtgagcttgaagcggcacttgacggaaccgaccggctgggcgagcaccgcacggttggcggggccgccgccacgacctacggcgccgccacggccatggaacagggtcagatcgatgtcgtgcgactcagcccacttggcaatgcgctcctgagcggagtgcagggccagcgtggcggaggtcgggccggcgtccttcgaggagtcggagtaaccgagcatgacctcgagcttgttgccggtggccttcagacgagcctgaacctcggggatcttgatcatttcctcgagcacgtccaccgagttctgcagatcctcaagctgctcgaacagcggaatcacgtcgatggtgggcacgtcctccgggtgggagaaggccaagcggttgagctcgtagacatccttgatgttctgggcactcttggtgaaggagatgatgtagcggcgggcggccttgaggccgttgcgcttctggatggcaccgagggcgcggaaggtgtcgagcacctcgtgcgtcatcggctgcagttcgccgcgctcgccgtgcaggccgtgctcgcggatatccgcaagggcgcgggcgtgcaccacggagtgctgacggaactccatctccaccatgtggaagccgaaggtctcggtctgccagatcagatcctgcagcgggccgtaagcggaacgcttggcaccggcggcggccagcgaacgctggaccaccttgaggtcggcgaggaagtcgtcgcaggagtggtacatgaggtcggcgtcgcgctcgatggtgtagtgcagacggtcggccatcaccagcatgaccgcgcggtgcatctccttggtggagatcagggcggccttgtcggtcagacgctcgctcatttccttctggtggctccagaggctcttgagctcggcgctcggcggcgtggtctcggcttccatcgtgaggttgcggcccacggtgcgggtggcttcctcaagggcggcgattacgtgatcggagaacttgcgggccacggcgcggctcaccttggcggtgacgttcgggttgccgtcgcggtcggaaccgatccagctgcccgggtggaagaacgcggggcaagcgggctcgacgagaccggccttatcgcccaggacccagtcgtcgaaacgacggtaaaccttggggatggtgttgaacagcgtgttgtcgaagatgtcgagaattgtgtccgcttcctcaaccggggtcggcttcttcagcgcgattggagaagtgcggaacagggcgtcgatttcgttgtagagacggcgcaggcattccttcttatccgagccgccgaggcgcttgtactcctcaagcaattcggaaacgcggcgaatcttgccttccacggccttacgacgggcctcagtggggtgcgccgtgaagacggggtggaattcgagctggttgagcagttccttggccttggccgggccagtctcattgatgagctggtggtaagcgacggtgagctcgttgatcgggtcgaccgcctggtcaacgggcacgttgttctcgcgctcgtggagcacggaaacgcggtagttctcctcggacaggtttgccagatggaaatacgtggcgaacgcgcgggccagcagctgggcgtcgtgcaacgtcatgttgtcgatgacgttcacggcctccttcaggccatcctggtcggggttcggatccttcagctcagcgaaatgctcggcgctggcctccaccgcgtaatgacgcacggtgtcgaacgtagacagcagttcggggttgtattcgcccagtacgttacgcaggatctcaagacacagatccatgtcgtacttcaggctttcgggaagatcatgctcctccgggccctttcggccggtcccggtagtgacgatggcggcgtcagcgggagtgatctgttcttcaggtgttgccatataacctcctttgccgaataacaggttgctcggtctactggtcgtctgcggctcctccgcagttgttgagaccagtcgttgcgagcccacagcccatattcaacgtggttgttgtgtgggcaatagtgtatccccgcgaaatcgctatttacgttacgaagtccatatagtgcgccaagttgtccacctatagagaccgaatatcggacagcatatgagacactgtccgattcgcggaagatttgagcgccttacgattgctggcggggaaggcagggagtagtaatgaaggatgtgagcgaacagaagaaaaaaagtgcgcccgaagcgaaaggcgcaacggctgtacgtaaattccacacccactccattccgctggacatggaagatattgcacgcgattgggaaaaaccggtggtggacgccggtatcgccgccaaagccagcgtgattgtacgagtcggcatgttggacctgggagccggcaccggctccttccgcgtgcgtgaaatgatgcaccgcatcgcctacccgctgggcgtgcacgtacgcgccgacgtgaacctgacggatatcgaggccacctgcacggatggtcgtaaccgcatcaccgaagtcgtggatttgccgaccaccggcgtgaacaccgaacgtatctggctgctggaacatttcgccgactggttctccgtgaatctcggcaaggggtcgatgtatcacgtcgattcgcaactgtccgatggcgtggtcaagcatttggacgaacgtgacgcttcgcagtattctgccgatctggccaagcgcctgcgcgaacgtgccaaggccgaggttgaggcggccaacggcagcgtggacgaggcgctggatcttgcgttgaaaaccaaggtactcgtgacctccgtggccaagtccttggacgatgacaatgaagaagcccaccgacttttggcggacagcgcggaagtcactccggtcgaagacaaagcggccgaagagaaggcctacgacgatgccgaagtgtttaccggtgactccaatgagtcggttgaatcggcgaacgcggcgaacggcgcaaccgccgaaagccctgctgcaagcagtacgaagcgtaagaatcgcgtgcccaaggaatacgccgaacacttcaacgagcgctccgacgaagagaaggccaagggcggtatcaccgtgcggcaggcgcacgagcgactcgatctgattgagcgccgcaagccgctgtacaagccgtggttctccggtctggcctccgccctagcctgcgcggccttcgtgttcctgctcggcggcggcccatacgacatgatcggtgcgttcgtgggcgcgggccttggccagtggatgcgtcgccggctgtttgcataccatctgaaccagttcttcgtcacctttgtgtgcgtggccgcggcggcgctcgcctgcaccggcaccctgcgactcatcggcattttcgacccagtcgcgctctcgcacgatacggcctacatcggcgccatgctgttcgtgatccccggtttcccgctcatcaccggcggactcgacatggcgaaaatcgacttcccctcgggcatccagcgcgtggcgtacgtgctgtgcatcatcctgatggccacgctggcaggctgggccgtggccgtgatggtgcacctgcacccggaaggctttgagccactggggcttgacccgtgggtcaacggattgctgcgattcgtggcggcgttcgtcggcgtgtggggcttctccgtgctgttcaattcgccgcagcgcatgtgcctgaccgccgccctgatcggtgcgatcacggacacgctgcgcttggaattgcaagacttcaacgtggcacccgagatggctaccttcatcggcgcgtttctggcgggcattctggcatcggtgtggcgttcatccgtgcgacgtggctggctaccgccgcacctcggctacccgcgcatctgcctgaccgtgccgtcgatcgtgatcatggtgcccggtctgtatatgtatcgtgccatgtggtacctcggcagcttccagaccatgaatgcgctggactgggcgttccgtgcgttcatggtgattatctgtctgccgatcggcttggcgatggcccgcgtggtgaccgacaagtcctggcgctacgacatctgaccgtcatcttagccccccctcaggtggggggagctcggataaaacagcgtctcagtatggaaacggtggaaggtgcttgagcccttgtatccactaccatcaggcgaagtgcgttgcggccgtattcacggctgtgacggtctgtatgacgccgctccggcgtcaatcgcatatcagcacatagttctgccatggcggtagccgcttggcgtcatgattgaggaggggcgcagttggccaacgatttctggattctgctggccatggtcatctattttgcggccatgctgtccatcggattcatctactccaaacgctccaactcctcctccaaggaatactttgcgggcgggcgcggcgtggggccgtggctcacggccctgagcgccgaagcctccgacatgagcggctggctgctgatgggcctgccgggcctggcctacttcaccggcgcggccgacccgatgtggaccgccatcggcctggcgctcggcacctatctcaactggaagcttgtggcccggcgactgcgccgctactcggtagtggccggcgatgccatcaccattcctgacttcttcgccaagcgtttccatgacaagaagggcgtggtctccaccatcgcggccgtgatcatcctggtgttcttcagcgtgtacgtgggcagctgcttcgtgaccgtgggcaagctgttcgccacgttgttcggtttcgactaccacgtcatgatgatcatcggcgcggtggtcgtgttcgtctacaccgtggtgggcggctacttgtccgtggtgatgaccgacttcattcaaggcatgctcatgttcttcgcgctcgcggtggtgttcatcggcaccgtggccagcgcgggcggcatcgacaacaccgtggaattcctgcgtgccatccccggctacctgtccggcacgcaggtggccgcgcccaagctggacccggccaccggccagcagctcgtcgaggcgggcaaagccgtgttcggcgcgccctccgactacggcatcatcaccatcatctccatgctggcgtggggcctgggttacttcggtatgccgcaggtgctggtgcgcttcctgtccatccgcagcgtggaagaagtgcgcaagtcccgaatcatcgccacctcctggtgcgtgatttcgctgggttgcgcagtgtgcatcggcttggtggggcgtgcgatgatgcccaccgaactgctgacctccaccgatgcggaaaccatcttcatcgtgctggcgcagaccctgctgccgagcttcatgtgcggcgtggtggtctccggcattttcgcggcctcgatgagctccagctcctcgtatctgatcatcggcgcttcggccatgggcgagaacatcttccgcgggctgctgcaccgcaaggccaccgacaagcaggtcatgattgtggccagggtcacgctggtggtcatgttcctgttcggcattctggtggcatacgaccagaactcgtcgatcttccaggtggtgtcttacgcgtgggccgggcttggtgcctcattcggcccgttgatgctgtgctcgctatactggcgtcgcgccaacaaggccggcgccgtggccggcatgctgtccggcacggcggccgtgctgatctggcacaacctcgtcaagcccttgggcggcgtattcgccatctatgagctgctgccggcgttcatcatttcgctgctgttcatcgtggtggtttcgttgctgaccgccaagccgaacaagcgcatgctctacgaattcgaccactacatggacgatccgctgcccggcaccctgccgtccggcaccgtgctcgtcgacgagcccatggaagccatggagtccgaggtccgcagcggcaaatgacacgtgcctgctgtgcggtcggctcgtatggcagaggagtggcttttttgtggttcggcaggaaccattgaggccagatcagccccttgaaatgggttttgaataccgtagcgcggtgcggacggtgcggactgactctaccgggcttattattcctgcgccgacggcgcgattcagcttggacgaatctccatggcgttcatgcaaaggtggcatgatggcgggtatgagtagcttggtgcgtattgtcaatgccggtgttccggggtctcaggaccgcgtggatgtggtgcttcgcgatggggttgttgcgtctgtcagccctgctggaacggtctcggcttcggacagcacgatgcagactaaggcgcatacgacatcgttggaatacgcgacgaatgccattgcttctggcagcgtctcaatcccaacgtcggccgccgcacccgccgacgaaaccaccatcgacgccgacggcctgtgggttattcccggcctgtgggactgccacacgcacttcacgcaatgggctaagacgctgggccgactggacctcatcaatgcccgttccgccgccgaagcgatggacatgttgcgccgtcatctggatgagcgccgcgccgccgacacgcttgacccagatgccttcgtggtgggcatgcgattccgtcactcgctgtgggccgacgacgagcagcccacactggccgcaattgacgccgtgaccggcgaacagccggtggccctctccagcgcggacatgcactgcggatgggtgaattccgccgcggcccgcaggcttggcgtacatgtggacgaatccggtctggtcggtgaactcgaatggttcaacgcctacaccgccttcgacaaggcgccgggcgctgctgaagagactgaccgtctgctgcgcgaggccgaacaggacgccgcaagcaagggcgtggtgggcatccgcgattatgaaatggccgaaaacatcgatacatggatcaatcgtttcgcggccggcattaacggtttgcgcgtggacgccggtgtataccccgagcggttgcgagccgccattgacgcgggttggcataccggcaaggaattgccgggcagcgccgggcttggccatgtgggcgccatgaagctcatctcggacggatcgctcaacacccgctccgcctactgctccacgccgtattcgggcatcgagccgctgacgtatggcacgctgagctacacgccgcagcaaatcgaagactatatgcgcctagccaccgagcatggcttcgacattgcctgccacgccattggcgacgaagcgaacaccattgcgctcaacgcagtcgccgccacgcacgcacatggatcgatcgagcatgcgcagatgctcaaacccgtcgatatcccgcgtttcgccgagctggggctcacggccagcatccagccgcagcacgccatggatgaccgcgacgtcatcacccgtttctgggccaacccggccggcatcccttatccgttcagggccctccacgacgccggtaccacgctgcgcatgggctcggatgcgcccgtggccccgctggacccgtggctggccatttccgccgccgtgctcggcaccgaaagctctgaccgcgagccgttccagcccgagcagtgcctcgatgtgcatacctcgctggcagcctcgaccgccactggccgtgaccgccttgcatccggcgacccggccgatgtggtgttgctggacgccgacccatacgccgccgatactccggaagccatgcgcgctatgccgcaacacgtcgtaatgacattgctgtgcggggagcgtacgtattgatgcaagccatcggcatgaagtgaacagaggtccgtcttgatagccgcgttgcacggaaaaacaagaaatccgcccctcgaagtgaagataggacacagcagacgccgcaatacaaaaacgccgtgtcagttgcccagttggggctgacacggcgtcttgctacgagcggcgggaaaatcagtacttcatgcccatggcctcgcgcacctggtcgagggtctcctcggcgatggcgttggcgcgcttgttgccgtcgtgcaggatgtcacgaatggaatccatgtccttggccagctcggcgcggcgctcgcggtgcggggccaggaactcgttgactgattcgatgacgtatgccttgagcgcgccggcgccggaatcaccgatctcctcggcgatgtccttcgggtcgcggccggtcaccaggccggcggtggtcagcagggcggagacctgcgggcgggcaaccgggtcgaaggtgatgcggcgctcggaatcggtcgggctcttcttgatgagcttggcggtttcctcggcggtggcgcccagcatgatggagttgccgtacgacttgctcatcttgcggccgtcgagacccggaatctccggtgcctcagacagaatggcggccggctccgggaacaccgggttcttcttggcgtaacgctcgttgaaacggcgggcgatggtgcgcgtgatttccacgtgcggcaggttgtccttgccgatcggcacgacattggccttgcagaagaggatgtcgcacgcctgatgcaccgggtaggtgagcagcagaccggtcagcgcgtggccggacgcctccatctcggacttcacggtcgggttgcggtgcagctcggcctcggtgaccaaggacaggaacggcagcagtagctggttctcggccggcacggcggagtgggtgaacatcatggtcttgttcggatcgatgccggcggccatgtagtcgagcaccaggttcagcacgttgtcttggatgtgctcggtggtgtcgcggtcggtgatcacctggtagtcggcgatgatgatgttcgtgttgacgccgcgctcctgcatggcgacacgctcacggatcgagccgaagtagtggccgaggtgcagccggccggtcgggcggtcgccggtcaacatggtgaaggacgacggcttggcctccagcttggcgagcgtttcgtccgaacgctttttggccgcgaggaagctcgcgctcatctcattgcctgccgctgtcagttgctgctcgtcggtcatgcgaaaatcctttgaatatgcctcaaataaacgctttttatggtaaaagtgtgagccgacaacgaacaagccactattagtggtactctctattgttgatgaatcgaacagcacagtaatcgcagggggtcagatgggccgcggacgtcaaaaagcaaaacagcagaaaattgcccgaaagctcaagtacctgaccaccgataccgactacgatgagctggcaaaagagctgagcgagcaggagccgggaatgggctctcctgacccgttcgccgacatcgatgaccagtatgcggacaaggatgtggattccgctgctgatgaccacgcttccggtgccgccgaggcagctcccgctacgcaggaggatgacctcgacgagtacgccaagtgggctgccgaagccgccgcaaaggcgaccagcggcgagttcccggcctccgcgcctgccgcaccgaagccggccccgcgcaagccgattccgatgcccatgccttccgcgctcaagcccaagaagagctgaacgccggtcttctcgtaataatccccttgtgcttggttgagcacaaggggatttgtggttatggctgatggtgccgccgctggtggcgtacttacgcttcgcgcctcacagcggcagcaggtcgctcaggtcgtcgcgctcgccgaccgcgctgatgtggccggcgtccttttcctctgcccatgtggtgatgccgcaggccagtcgtagccagacttccgggtccagctcgatgacgtccggcggggtcaggttatgcgggtccgattccgggccgtccaagattttgaccgcaccccacggcgcaacgcgcacctccacgccagggccgggcgcgcgccgctccagcaggaacagcgagtagcgcacggccatcgcccacaccgggcgtggcaaaacaggggagacagtcagacgatgtggtgtgttgtccgccagctcccgggccgcggcacgccattgcaccagcgcgtcatgcccgcgtttcaggtctttttcaagaattactgccatgtatcccatcatggcatcggagccggaagatcttccataatgcaaacgatggcatacggtgtgatgcggaacatcgggacatgtgctacgctctcaatgagaacgtatgcaagagcgctccgccatcgtcgttacggagagttcatgcttacgtctatgcgacgatacctatcgcgcggcataataaacacgggcacttatcccggaaggaaagtcagaatgaccgaaatcaccgcaccgaagtctcctgtcacggcggaacaattcgccgacgagattcgtgaacaactgaaatacactcagaacgtcaccaccgagcaggccacccctgctgacgtgtatgtcgccgcatccaaggccgtgcgcaaccaccttgccgactcctggttcaagacccaggccgacaccgtgaacggcaacaccaaggccgtcggctacctgtccgcagaattcctgatgggtaagcagctgcgcaacgcgctgctcaacgccggtctgaccgagcagttcgacaaggctgtggaagcccttggcttcaagccgaaggacatcgtggatgccgaatacgagccgggccttggcaacggtggccttggtcgtctggccgcctgcttcatcgactctctcgcctcgctgggcgtgccggccttcggctacggcatccagtacaagtacggcatcttcaagcaggagttcgacaaggacggcaagcaggtcgaaaccccggactactggctggccaacgaagagccgtggggccacatcgactacaaccgcgaccagaaggtttccttcggcggcaaggtcgtcgagaacgccgacggcaccaagacctggcagcccgcatggtccgtgcgcgccgtgccggtggactacctggtccccggctacaagtccggccgcgtgaacaccctgcgcctgtggagcgccaagagctacgacgagttcgatctgctcgccttcaaccgctccgagtacatggaagccgtgaccccgcaggtcaaggccgagaacatctccaagattctctacccggaagactccaccaaggtgggtaaggaactgcgccttgagcagcagtacttcttcgtctccgcctccctgcacgacgccatccgcgtcttctacccgggccaggacaagccggacctcaccacgttcccggacaagatcgtcttccagctcaacgacacccacccggtgatcggcatccccgagctcatgcgcatcctcatcgatgagtatggctacgactgggataccgcgtggtccatcaccaccaagaccttcaactacacctgccacaccctgctgccggaggccctcgaggtctggtcggccagcctgatcggcgagctgctgccgcgccacctcgagatcatcgagaagatcaacgcgcagttcgaggccgagctcaaggccaagggcgttgccgccgacaccatcaaggacatggccatctacaccggcgacgccgtgcgcatggcctacctggccacctacggtggctcccacgtcaacggcgtggccgagctgcactcccagctcctgaaggacgtcaccctcaagaacttctccgacgtctacccggacaagttcaccaacgtgaccaacggcgtgaccccgcgtcgcttcgtcaagctcgccaacccgcgcctgtccgacctcatcaccgagggcctgggcaccgacaagtgggtcgccgatctggaactgctcaagggcctcgagccgctggccaaggacgatgagttcgtcaagaagttcgccgccgtcaagaaggccaacaagcacgcattcgtgggcttcgccaaggaccactacggcatcgatatcgacgagaacaccctgttcaacaccatggtcaagcgtctgcacgagtacaagcgccagtctctgaagattctcgccgtgatctccacctacgccgacatcaagtccggcaaggtcaaggccgaggacatcactccgcgcaccgtgttcttcggtgccaaggccgctccgggctactacctggccaagatgaccatcgagctgatcaacaacgtttcccgcgtgatcagcagcgatccggccgtcaagggcaagctcgccgtccacatgctgccgaactacaacatcgagatggcccagaacctcatcccggccaccgagcttgacgagcagatctcccaggccggcaaggaagcttccggtaccggcaacatgaagttcgctttgaacggcgccctgaccgtgggtacgctggacggcgcgaacgtcgagattcgtgagcgcgtcggcgccgacaacttcttcctcttcggcatgacggtcgacgaggtggaagcccagtacgccaacggctacaatccggccaagtactacgaggccgatccgcgcctgaagcaggccatcgatctggtggccgacggcaccttctccaacggcgaccgcaacgcctactccccgctcgtggctgactggctgaccaaggactggttcatgaccttggccgatttctccgcctacatggacattcagtccgagatcgaggccctctacgccgacgagctcgaatggaaccgcaaggccgtgctcaacgtggccaactccggctacttcagctccgaccgctccatggaagactatttggaacgtatctggcacactgctcctctggctgactgagtgagcgagttgctagcgtgcggttttcacgaaatcagccttgacttcgtgaaaaccgtacgctgagttggagtaagcgtgcggttttcacgaaatgaaccttgatttcgtgaagaacgtacgctgagcgcgactcagtgtacggttttcacgaagtagggctttatttcgcggaaaccgtacgctgactgagctacctctagccccctctgatgagggggatgtcagcgaagctgactgggggagagacttctcccagacgcccaagacatacaagaaagccccgcaatgatatatcgatcgacgatatatcattgcggggctttcttgtgttgaaagaagagagggggtatcaggcctcggccggagcttcggctgcgggcttgtcctcatcctcggccttattcagacccaggtcgaccggcgaggagctgttctcccacggctcctcccacggatcgtaatccgggttctgctgcttgtagatgtacaggccaacaagcgcggcgagcaatccgccgaacagcagcgcgaagaacttccaaccgttagaagacttgttctccatgacggctcctttccctagggatcgtctggtcggtatgcccattcagaccgactctgctccctattctaggccgctgtttgtgacgattgggtggaatgacattcgtgggcgattcatccgcgcccgtctgcccttggccggctcggcatcttcgcggcgcgtggaacgcatccgagaccttcgatacagtgggctgcatgcatattcctacacaacgggagattcgataccagtgggagcgcggtggtccggtgatgacctgggcgctgattgttgcgtgcgtggcagtgtggctactggaggtattgctgggatttattgccccgggcctgagggcttggttgatgtacctcggcatggcggctccggtcagactggtggctgagccgtggacgctcatcacctcgatgttcctgcatgcgccgaactcgctattgcatatcctgttcaacatgattgccctgtattccgtgggcccagtgctggaacgaatgatcggccactggcggttcttgggactgtatgtgatttccggccttggcggctctctgggacttatggtgtgggctgcggtggctccgggaggcatcggctggcaaatggcagcctatggggcttctggagccttatttggcctgtttgcatcattgctggtggtatatcgccgtatcggcgccgatatccgctccatgttgatctggatggcggtgaacttcgccttgccgttcgtggtcggtggcgtggcgtggcaggcgcatgtcggcggctttgtagtgggtggaatactcacatggctgctggtgggtggtgtgccggcgtggcgcggtaaaagcctgaaatggcgcatgcaggtgtacggctgggccatggtggtgctggtcattgcgttgattctgttgtgcaatatggccaatccttacgggtggatgagtttcggctccctgcactgatatggcttgatatggctgtaaaaaacgattgatgccgggtattgcggaacatgcagtgcccggcatcagtgtatgtgcggaaagcggcgatgtggatattagcgatgtggatatcgtcgttcggcaagtgggtgtgtgccgtatgaagatatccacagtaatgagatgcgcgcaatgacgagttatccacgacaatgagttatccacaatggtgacttgtgcacaagtgtgtagaaaagtgcataagactgtggataacttatgtggataagttaggaatgtcgcggaattgctgggtttgttgcagtggataaattgggtgtataactgttccctcgctgtggcgatgtatgccaagccaaagttatgcacgagatatacaccgagaaacgccgcttatccaccacttatccacatggttttccacattcggtggaaaactacatgggtgtaattcatccacaggctgtggataacgtagtggataagtcgtggataagtggtggatagctgtggatgaacaggctaaggcacgaaaaaggccgacctccgcatacgggaggtcggcctttctcataagaattaaggacaacctaacgatagaaaaaacaatctaccgatagataagcgcaacgagccggaactcagcgccatcccatcgtcatcaggaatccgatcatgatcagggcgaagccgatgccgaggttccacgcaccgatgttcggaatcggccaggaaccggacggggagaggtagtacaccacgcaccaaatcaggccgatgatcataaacgcgcagaacagcggcacgaaccaacgcgggttcgacttggtgcccttaatggtttcttcaacgcgcttggtgttctccgcctggcggttcatcatacgctgcatctgcggggtcagcgtggccttatcggcagtggcgttgagcacggcctgcacctgctccatattcacgccgtaagccgcgccttcctcggcagaagcgttctctgcgttctgctcggtgtctttgctggcggtctcgtcagcaacggtgctggatgaggtctcgctctgccagtccttctggttgttcgagtcggtttcgtgcagctcttcgtcagccatcagcatagtctccattcaataggctaaaagtcataatagtggctacactcgaaagcggcgaccagagtcggcaagaagacaggaaattcatggccagacatgtaggtaagcacggtgcacggcactccctatggggtggtgtcgcggtattcgtcgtcattgccttgaccggttttctgctgagcaccaacgtgagggtcaatcgtacggttgccgtcactaacgatacggctgatctggtggagcaaggcgtggacgaggtcaaccagctgcagcaggacgtcagcgatctgaccgaacaggtcgccaatcttacggacgcgctcaaggccgatggcaccgatggcaccgacagcacacagaaccaaggcaaggactccagcaatgtggattccagcctgatgctgcccgcgctcagcggcagcggcgtaacggtaacgctggatgattctccgttgtgggagaacgcagtcaacaacaacggcacgaccgccaatatcaacgattacgtgatccaccagcaggacgtcgaatcggtggtgaatgccttgtgggccggcggtgccgatgcgctgatgattatggatcagcgggtgctgttcaattcggcggtcatctgttccggcaacgtgctgtcgttgcacggtaagaaatactcgccgccgttcaccatttccgcgattggtgaccctcaaagacttcgcgcagcgttgaacgactccgaagccattaccattcttaagcaatatgtgaccgcgtttggcattggctacaaggtggagaatgccgaggaccttcagttccccgctaccgccgccttgctgcagcagttgaaatatgccacggtcgatacgtcaaagaccacagatgaggagcagactcagcaatgagacacggcaggcacaacagcggcgtaccggcgcccattgatctcgcgtccgtgtcggacgtacagcccttccccgaggacgatgccgcacgaatggcggcagacccggccaacgccagtagggcaaggtcccgtcgtgccgcagtacgcggcgcgtcttcgccccagcggagcccggtctggcaggcactcggcatctgcgccgaactgctgattaccgctgccgtgatttgcgccctgtacatcgtctggcagatgtggtggaccggtgtcgaggcggagcgagcccagaacgaaaccacccagtccgtcgactggagcgaccccagcaacaacgggggaacggtcaccatcgccaaagcccaggagggcgatgcgccggtacagccgaaagacgcgaaatatggcgacttgattgcgcagatctacattccgcgcttcggctcccaatggcaccgcaacatcgtggaaggcaccacgctcgagcagctcaatcgccacggtctgggccattacgacaccacccagatgccggggcaggtcggcaacttcgccgtcgccggccaccgcaacggctacgggcagccgttgggcgatgtggacaagttgcaggaaggcgatcccatcatcgttcgtaccaaggattactggtacgtctaccactacacccggtacgagattgtgctgcccacggacgtgcatgtgatcgcccccaatccggaagactccactgccaatcccaccaaacgcatgatcacactgaccacctgtgagccgaaatactccacccccacccatcgatggatcagctatggtgagttggcgtactgggccaaagtgtccgacggtgtgcccaaagagctggctactactgattcgtccggtgcagtgatgttctccaccaccgaaaccccctcgatcgcttcccgcattggctcgctggacaaggtggtattcggcgcgctggtagtgtggctggttctgttcattgccgctgcggtggcatggcgctggccggtgctgcgcgagattcgcgcgggtgagcgtcgccgtccggatgccagcatctatggcggactgttgcgtctgcagcccggcgtggcaccgattcgatggctgctgctggctctgctgctgttcgcagccgccgcggcgctgttccagtggggattcccttgggccgccgccaatatcccattcctacagcagatgtcgaacttcgtggcagcgagctgacggcatcctagtactatggcttgcagtacacgtccctcaaggagagccctatgaccgattccgcgcatattttggtggtggataactacgattccttcgtctacacgatcgtaggctatctgcaaacccttggcgccactgttgatgtggtgcgtaacgacgctatcgacccagccgcgccgggtgtactggacggttacgatggcgtgctgatttctcccggtcctggcgctccggccgaatccggtgccagtgaggatatgattcgcctgtgcgcggccagcggcgtgccgatgtttggtgtgtgcctgggcttgcaggcgctcgctgaggtgtacggctgcactgtggaccatgcgcccaccatcatgcatggcaagaccagcttggtggaacatatcgatgacgagattttcgagggcgtggccaaccccatgaccgccacccgctaccattcgttggccgtcgagcccgattcggtgccggatacgctggtggttaccgcgtggacgcaaggcgaccacattattcagggcgtgcgtgtcaagggcaagccgatgtacgccgtgcaattccatcccgaatccgtgatgacccaggacggctaccgtctgctggccaactggctcaaggtctgcggccaagacaacgccgtggccaagtccgccggcctccagcccaaagttacgaagtagcttttccgcgcggcgatactctccccggaatgtgtcgctagaacgaggcttgcgtactggttttgcgacgcttcccgggattgttgcgctgggatagctctttatacagcaaaggggaggggcgcagaagcccttcccctttgtgttgcgtgtatgtgttgcgctatttgcgttgcatatgcgcaacacatacacgcccggcgcttacttgctactcaccggttcactcaccggttcactcaccggttccgcccccgttgccagtaccgttgccaccgtctccggtaccggtaccgccgccagtgctgccggccttcgtggtaatggtgacggtcgatcccgcatctacctggctgccagcgccaggattgatgctgactaccacagcggtgctgccggttggaccattggcctgagccttgaggcccacggccttgagcatgagttcggcggtgacgtagtcagtgccagcggtgatattcggcacagcgaccttctccttgcccgtggacacccaaatggtgatgaacccgccctgtgcgatggaagagcccgaatcagggcttacacgggtaatcagaccggcctccaccgtatcggagctctcctgctccacagtgaagctgaacttgccctcatactgctgtagcacgctgtccttcgactgaccgaccaaattgctcggtacggtggtcatgccggaagaaacatatatggtgatggtggtgcccttgggaaccgactgaccggcggcaggatcggttttcgtcaccatatccttagtgatgtcggcgctgtcttcggttttgacggcggcgttcaccttgaacccggcgctttccagaatgctgcgcgcctcttcctggctgcgttccttgacatccggaacctgagtggactgcgggcctgcggagaaccacaccttcacggcagatcccttggccaccttggagccggcgtccgggctcatcttggtgcaggtgccttccggctcggtggagtcggtgtcttgcttttcggtcatcttcaaacccgatgccttgagtttgagctcgatgctgtccttggatgtggaagcgttgcacacctcagggatggtgacggtgtcttccgaggacttgttgccggagccgttcatggcgaacacgatgcccacaatgacaagcactgcaacaatcgctgcgatcaccgaaccgatgatgatcttcttgcgcttcttggccttggccgccgccgcacgctgctgcgcacgggactgcaacgccgctgagttggcaccattggccggtggaatctgctcgaactgaccggtcaccgggttgaatgcttgggtgggttgctgatgcggttccaccggcgtggtgggcaaatcacgttcggcttccttgcgggccttcatattcgacaggtccgtcaacgggttgaacgcggccgccaccggcacgccgccgttcatgtaggtcaggatgtcggtcttgaattcggaggccgtggcatagcgattctggcggtccttggccatggccttggcgcagatcgaatcccacatcttcggcagccccggcaccacggcggatggcggcgtggcgacttcggaaacatgctggtaggcgatggccacggcggaatcgccggtaaacggcgggcggccggtgagcatctcgtagagcacgcagccggcggaatacaggtcggaacgcatgtcgacggtctcgccgcgcgcctgctcgggagaaaggtactgtgcggtgcccaccacgccctgcgactgggtcatggtggctgcggaatcgtccagagcgcgggcgatgccgaagtccatgaccttgaccacgccctgctcggaaatcatgatgttgccgggcttgatatcgcggtggataatgcccatgcgatgcgaatagtcgagcgcgttaagcacgcccaacatcacctgttcgcagtcgcgctggctgagtgcgccgttgaccttgatgatgtcgcgcagggtctggcccttgacgtattccatgacgatgtatggcagacgctcggcatcgccgctttcggaagaaaccagttcttctcccgaatcgtagatgttcacgatgttcgggttgttcatctgggccacggcgtgtgcttcgcggcggaaacgggccaggaagatgtcgtcgttggccagatcggcgcgcatgattttcacggccacggtacggcccagacgggtgtcaagagccacgtggacctcggccatgccgccacgaccgatgagctggccaagctggtagcgtccgccggccaatgcggtgggcatactggtgctcattgcttattccctcccaatcttgaggccggggcctccaaaacaatgcgtggcgtgctggtcactcggcgcggcagtcgattgccggacgtggccatggcggtgtcggccatttcggtctgctgatccagcagacggcgttcgatgcgtgccagcgtacgggacaccaccagcgcgtctttcgggcgatccaacgggtccttggccagcattgacatgacaaattcgcgtaactggacgtccaccgagtccggcagcggaggcacgggattgttcacgtgcgctgcggcgatatcgaccggagtggtgccggtgaacggacgatgcccggcaaggccctcgtacgccactacgcccagtgaatagatgtccgattgcggcgtggcctgctggccctgcgcctgctcgggggagatgtattgtgcggtgcccaccaccatgccgtcctgggtgatctggccctgacccgtggagtagctcacaccgaaatcggtgatcttcacttcgccggtgtcggaaaccatgatgttggccggcttgacgtcacgatgaatcacgccgtgcgagtgggccacgaacaggcctcgcgcggtctgaatcaggatgggcagcagttcgatgggatccatcgcgcccttgctatggaacaggtccgccaacgatttcgaggggacgtattccataatcagaaagccgatgccgtcatgctcgtagtattcgaacaacgcagcgatattcggatgcgccagattggcggaattatgggcttcggcacgcaggcggcgtagcttggcctcggcgttggtcacgtccgagcgcagcgccttgatggccacttcacggccgagctgaatatcgtagcctttccagacctcgcccataccgccttgcgcaagacgcgaatcaagacgatatcggcggtgaataagctgtccttcgataagtttcactgctgcaaagcctcctgcatcatcgcgcgcatgatcgggccagcggcgagcgaaccgtacacatctgtgttatgcaccaacaccgcgacggcgatttgcggatcgtccgccggcgcgaaaccgatcacccagccgtcgatggcagagttgtcgataccgatttgtgcggtaccggttttggccgccaccttgatgccgtcgatggccagctgcggattggcctcggtcaccacgctttccatcatcgtggtgagcttgtctgcggaatcctcgctgaatgcgttggccatggtctgcggcttggtctgcgaaagcacggtgagatcggcggcgcgcacacgatcgaccagcgtgggctgcatcagtttgccgttgttggcgattgcctgcgcgaccatcgccatctgcaatggcgtggccgtggtgtcgccttggccgatggacgccagcgcaagcttgtcgtcggtcggatcagaggggaatgtggacgcggtggccgtcatcggggtgcccgtggattcggtgccgtcaatggtgatggtgctgccgaaaccaagcttggtggccatgtccgaaaccttgcccgcgccgagtttcacgccaagctgggcgaacgcggtattggacgaccatgcgacggcctcttgcagggagatctgcccgtttacgccatcgccctgtgcctcgtcgttcggcaactgtgtggcggttcccggcaaggtatagctggagcccgcaggaatcttcgtgtccgtctgataatcgccggtttccagcgcagccgaggcgacgatggtcttgaacgtggaccctggtgggtacagctgcgaggtgacgcggttgatcagtgggctattttggcccgcagaaagttcgttgtaggcctgagacgcggctttggtgtcatgggtcgccagtttgttcggatcataactgggcgtgctcaccatggcgaggatacgaccggtgctgacttcgatggccaccgccgcaccatcgcgcgtgccgagctgatcgtaggcaacctgctgcagcttggggtcgatggaggtttcgatggacgcgccctgatccgtagcgccggtgagcatggccttggcccgctgccagatcaatgaatcggcctcgccgttgagcagcatgctgcgggaggcttccaggccgcgatcggcggtctggttgatggagaagaagccggtgaccggagcatacagcggaccgttggaataggtgcgcaggtatttgaacgcgtcgttgaccggctcggatttggccatgaccgtgccgtccgaggccagaatggcaccgcggtaggcgccgagctggtggtacagcgaacgggcgttgcgcggatcgttgttcagcgcgttggcccgtaccgccatgatgatggtggacgacaggccgagaatcacgaacagcgcgaccacggcggtgaaaagctgacgaagatatttgttcatacgcgagtgcctccgttaacgggaggaagcgggggaatcgtgccggtaggcgtgtacggttcatcggcttcggcatacgacggagtggtggtatccacgatggggtcgtcaaacgattccgactcggactgcgacgccgtagccgacgcgctgcgaggctgaacgatcggctcagtggcgcgggcccgggcctcaagttccttgttgcgcagcacggccaaagcctcgtactggaacgtatccgaggtcagctccggctcgggcgcattggccgagttcgagatgatgatgagcagggtcgcgagaatatagttggcgatcagactggagccgccggccgccatatagggcagggtcagaccggtcagaggaatcaccagcgtgatgccgccgaccacggtgaacacctggaaggccatggtgaacaccagtccggaagcgagcagcttgccgaagccatccttgattttcatggcggtgataaagccggaggcaatgatgagcaggtagagcatcaaaatggccaggacgcccatcagaccgagttcctcgcccagagaggcgtagatgaaatcggagttcgcgaacgtaacgagcgaaggatggccttggccgagaccggtgccgagcatgccgcctgatgccaggccgaaaatgccggtgaccagctgccaggagccgccgggggtcttgttgtattgctcgttgctgaacgggtgcagccaggcgtcgatgcgctgacccacgtggctgaacatgcctgcggccagcacggcacccgcggcgaacgcgatcagaccgatgatgatccagcttttacggccggtggccgtgtacagcatggccacgaacatggcgaagaacataagcgaggtgcccagatcatgctgcatgacgagcacgcccatcgaggcgatccacaccacgatgatcgggccgagatccttgatacgcggcagctgcagaccgagcatcttcttaccgcccacggccagctggtcgcgatgatcgaacaggtaggcagcgaagaagaacgcgaggaacagtttggcgaactcgcccggctggaactggcccaatcccggaatcctgatccagatgcgcgcgccgttcacctccatgccgatgaacggcagcatcggggcgagcagcagcaccaggcccaccaccatcgacacataggagaagcgtcgtagcacgcggtagtccttcaggaagatgatgagcagcgcggaaagcacgatggcgatgcacagccacaccagctggcgttgggccaccgcccaaccttcgctctggtcgatgcgggcgatcatggtcacgccggtggcggtcagcagtagcacgcaaggcagaatcgactggctggcgtacggctggaagcgcacaatcagcccccacagcaccagaaacagcactacgaccaatgccagcatgccggcgtattgcatagggaattcgccggtggtgcgttggaacatctggatgaacgccaacgcgctgatcgccatggcaatcagcaacaaggaaatctgacgtagacgggtagcgatcattgagaatcccccgtggccgcgttgtcggccgctccgataccggatttatccgaggaatcagatgagcttgacgaaccggactggctggacgaatccttggtgctgtccttggaatcgctctgggaactgtctttggaactgtccagggaattggacgcctcggccttcttggcggcgtcggcttcctgctgcttggccagtttgcgcatttcggtgcggatgatacccacatgcgactgcgcttcgtccaacgaaccgactgtgatgccttggctcagctggtcacgccatgtctgaggcaggtccgcggtggcgatattggtggtctgcacttcgtgcgaaagctcaagtccaaagagattggtcggcacgccacgataaatggccacggtgccgttgctatctcccacgtagtagtgcgtctggctccacgtgtacacgccccagccagcgccggccaaggccagcacggcaagaatgcaggtaataatcaccgcaagcttattgcggcgcttcttggtgcgcgtggccttcttctgctcgatctgctcatcgcggatggctttggccacatccgggtcgttggggtcggcggacaggcgcccatccggcttttgcaccaccggaatctcaccggtatcgggattggctcgttcaccggtctcctcgcggacggtggacggctgcaccacgcgtgtggacgacggttcggccgtggtttgcgcggcctccgtctcgtgcgcgccggcgggctgaatcaatgctgcggcgcgctgggcgggggaatcatcctcacgcagcgcgggcgcggtagccaccggctcgttgacgatgtcggcgatcggctcaagattacggctggcggcaccgccgaccaacggcgtttggtgcggcagatcgaacgcatcggcatccaacgccaacgtggcatccgcaataacggccgtgacattatcggtgctgcctgcccgcagtgccatctgcaccagacgctgcgcgcattcgccctgatcggacagcgtggtcatcgtctcttcgatggtggaatcttccagcacaccgcacaggccgtccgagcacagcagccaacggtcggcggggtgggctcggcgaatcgaaatatccgggcgcgggtcaatgtcaaagtcgccaagcacgcgcatcacgacgttgcgctgcgggtggttcttggcttcggacggggtgatacgaccggtgttgatgaggtgttgcacgtagctgtggtcgcacgtgatgcggctcaggtgtccgtcgcgcagcaggtaggcgcgcgaatcgccgatatgggcgatgacccagtagccggccaccaatgccactgcggtaacggtggtgcccatgccggcaagcttgcgttcgcgcttggccttgccgacgatggcgtcatgcgcggccataacggaggtctccatcatgcgggagatcgtctcgacgttgccaccggtgtcgtcctgctcgatgtgggccagtgaccggatggcgatggaggatgccgtatcgccgccggcgtgaccgcccatgccgtcgcacatggcgatgagatgctcgccggcgaaggaggaatcctgattgttcgcgcgcacggtgcccacatcggacaccgtggtggaatacaggaacagcggttgtgaagcggcggattttggcatgcggctacctcagttcgaaggtggtggcgccgatgcgcacaggaatacgagcgggcaggatggtggggcggctgatgcgctgctggttgaccacggtgccattggtggagttcaggtcttcaatggcccactgcccggagcgcgtgtcacggtagacacgggcatggtgggaagacacgaattcgtcatcgagcaccacggtattcgaggcggcgcggccaagcgtgatgtcggcttcggccagcggcacggagctgccggcaagcggaccatcgatgatgaccaacagggtaggctgcgccgaggcggcggacgacgcggaagcgctgggctggcgatgcgggcgcggcgcagctgcctgcggcgtttcggccttggccttatgcacttcacgctcacggcgacgacgcgcgcgcgaaggtcgcggactgaacgtctcgatgtccttgcgcagcgaacgtacggccagccagatgaatatccacagcaggatcaggaatccatacttgagcagggcgaatgtcagttcggtcataagtggacgactttcgggcgtgtgctcgactactcctgggcttgggcggaggcccagtacaggatgcgggtacggccgatggtgatggtgttgccgtcgagcagcgtggcggcgggcacttggtggccctccacgtacgtgccgttggtcgaacccaggtcgcgggcgatcacgccgttatccgtgatgtcgatttccaggtgcttgcgggagatgcccggatcgtcgatgacgatatcgcaaccggaaccgcggccgattaccgtcttgtctttggtgagcaggtactggttgccgttcacctcgagcaccgggctatcctcggtctgcgcatcggtggtgaccggcacggcattgccctgcacggattcggaggtgaggttgaagttgcccttggacaggtcaaggtcttcctcgaagatcacgatcaccgggcccacgaaggcgtaatgctggctcttcgcgtactcggtgaggttatcggccagttcgttggccagggtctcgctaccccatgcctcgatacggtcgaagtcaggagtactgagcttgaaacggtattcattcggggccaccgtgcggtcacggcccacgggcatggcctcggcgtcaatctcgcgctccaaggcgctggaaagatcgacaggctgcaggtctttggagccaaacttggcgaatactccgttgactgcaccctccacgcttttttcaaaacggtcgagaacgctcatagtcctccctttctaatcttcacccatcctacgcggtgatgggaatatgagacaaaaaaccggtctttcacgtgacgatgagtgcaaaatatccaaaaattcagggcggaaatgggtgcggcgcaccacccgaggtgctttaccggtggagcacctcgggtgggatgcgcgtgttatcgatttgtcaggccagcgcgtcgcgcaggaaatcgcgctggagggtgagcaggttttcggccacggtctcgtcattggtcatatgggtgatgcccgtcaacggcaggaaggtgtgcgggcgacccgccgccatcagggcttgcgagaggcgcaggctgtgggcgatggtgacgttgtcgtcggcgaaaccgtggatcagcataagcgggcgctcgagtttcggtgcgtcctgcacgatgccgtttcggtagtagacatccgggtcgaggcccagatagcgctcggtgtagtgcgtgtcgtacagcgtccagtcggtgggcggggcgccggcgcatgcggccttgaacacgttcggcgcgtccagcacggccagtgcggacaggaagccgccgtacgaccagccgatcatgcacaccttgtcgaggtccggcatgggaatcgcctcccgctggcgggaggtggcgcgaagcgccggtgggtggttctcggcgtctgcctgatcgcccgcagccggctgtgccgcacgtgattccacatcggcgttgagccgggcgacggcctcgggcagggcgttgacggcctcgacctgatcggccagcgttacgtccttcatatcctcgaagatctcgcggtcccatgccgggccgcggccggtggtgccacggccgtctgccgtgaccaccaggaagccttggtcggcccaccactggccctcccagtagaaggactgcgaggcgatgacctgctggaagccgggcccgccgtacggcttcatcagcaccggcagcttctcggcgtgcgcgtacgggctttccgggctcggcgcgatgatcgccgtgtacagctggtgctcgcccagtcgcgtaaacgtgacgttcggtgtaaagccgggttcggccgccgtggacgcgatagtggcgctctgttctcccagaatatgccgcatctgggcgcgggcggaacgcatatcgcggccggagaccacgatgccgcgctcgccgcgcgaggcggtccactggccgggatcggtcgtgaccggcgtgatcgtgccgttgtaatcgatactcaccacgtcgaaactgcgggcgtcgtggtcgccgaatacggactcggtggcggccgcatcggcccaagcgtccggcacctcaggcgcgatttcgggcgcgcgctgcaccacggccagcacatcctcgtcggtcacggcgagcaccgtgcgcacgttccagccagccggcgtgaacgggcggccgtccattgtcagacggttggtgtccgtggccatatcgttgagcgagcacaccagacgaccatccggcgtgtaggcgggcgtgccgtgaaccaggtcgatccactgctcgttcgcgtgctcctcaagcacacgcgtggcacccagcgcggccccatccgccgcgactgccacctcaagcacctgatcgcgggtctgacggcggttctgcaccagcaccagcggatcgtggccgcgacgccagttcacggcggccacatactcgtacgcctcgcgatcccaatccacatcggcgttgccggtgatgcctgcgtaccggtcgttctcatcgaacgccagcgtgatcacggtcagatacacgtcggcattgcgggtcagcgcgcgcgggtaacggcggccggcgtccggcttctcggggtcagccggatcgctgatgtgccaggtcggctcgtcggcggtgtcgaaggactcgaacagcacgtgctgcgaatccggggcccaccagaagccgtcgtatcggtccatctcctcgccggccacgaactcggccagaccgattttccacgtgttttcggccggattgccgtcctcatcctccacgctcacgccgtagacggcggtgatgcggtcacctagttcgccgccgatatcgaccagcatcaggtagctgcccgtggtgtacagcacatgttcgccatccggggcgatgcgcgggttcagcaccggcgtgtacatcgccgggtcctcatcgagccattcgccggccagttcacgggtgtgcggctcgggtgcgccggtctcgtcattccaatcgatgtcggtcaggaacaggcggccgttgatggtgaacacgatgcgattgccgtcgtcatctgcggagtatccgacgatgccggtgccgccttcgcgcgcacgctcgcggcgggccttctcctcggccggcacgtcctcgctgtcggcggttgcgcccagcagttcgcgcgggtcggccagcttggtctcatggtgttcgccggactcgtcgaaccagctcagccacagtgcggtcaccagatcctcggggccgtcggagcgcaggaacagggcccgcgagccgtcgcccacggtctgtgcggagcgcggtgcgccgcagccgaagcgcagcgtgcgcgcccggaggcgtgggaaatgcttgattgcgtcattgacatcattggtttcgctcatacctcacaacctacgcgcctgtgcggtcagtggcgcgcaggcttgcgacgcattcccgggaatgtgtcgtggtgtgggtgcgaggtgtgggcgtgaggcttgtcctaagatgggagccatgcaggtgacgatgatcgacgaaaacaagtacgccgaaacgatgaccgacgtggtgctgcccgcgctcgaacaatgctgcgaggagggctggttcgatccgtccgccgccgaacgttcggccgggatcgagccgctgtccggcattatggacaccggcggccgctcgggccagctgcactacctgtgctacgactccgccaaattcgacgcgattcgcgagcaaggcgccaccgccaccttccgcggggccatcgtcatcagccacggcttcaccgagttcgccgaaaagtacgacgagctcgtctggtacttcctgcttgccggctactcggtgtgtgtactcgagcatcgcggccacggcaagtccgcgcgcgacgtggacaaccgctgcatggtgtggattgatgactggcagcgctacgtggccgatctggccggcttcgccgaaaccatcggccagcagtacgcggccggcatgccgctgaacctgttctgccattcgatgggcggcggcatcggcgcggccgtgttggagcgataccccaccctgttcgacaaagcggtgctctccgccccgatgatcgcccccgccaccggcatgccgctgggcgtggcccgtgtgctggtcggcgcgctgtgcggactcggcttcggcaagaagcgcgtgttcgggcagtcgggcttcacgccggaattctcgatggaaggcaacgagggcgcttccgaagcgcgtgaacgctggtacttcaagctgcgttgcgagaatagcgaataccagacctactgcgcggcgttcgaatgggtgcgccaagcgttgaagctcaaccgggccatactgaatccgtccgcctgcgccgaagtggagacgccggtgctgctcttccagtccggacgcgacatctgggtactcaataagccgcagaatcacttcgtccaactggtcaaggacggcggcggcgaggcgaacatcgtgcgcttccccgaatcgcgccacgaaatcttctccatgcccaacagcacctacaagccctacctcgaaaagatcctcggcttctacgacgaccccatgattgcctgcgccgcgtactgatgtagctcttcacccattgttcaccgtgcggtcaccttgtggcccgacccgctttagatggcgggagagccatggaattatgggcataatgtcttctctccgccgccgcggttgcggccgcggtatgtgccggcgtgctcgcgttgaccggttgcacggcgttcaataattccgatgacggcacagcggacggcaacggcacgtccgccaccacgcagaccttccagccgtccggcggcaaaccgactgccaccctgagcattgcccccggctccgaaaacaaggaagtcgccgtcgccatccagaaagcggccgaccaatccaacgtagccgtgacgatgcactacatgggttcgctggagattatgaacgcgctcaaggccggcggccaggatcacgacgccgtctggcctgcctcctcgatgtggatttcgatgggagacaccaagcacatcgtcaaagacgcggccagcacctccaccacgccgatcgtgttcggcatcgccaaatccaaggccgtcaaactcggctgggctgacgacaccggcgccaccaagcccgtctccaccgcggacatcctcgccgcggtcagcgacggcaaactcacgttctccatgacctccgccacggtgatcgacagcgcgctcaacgtctaccagaccgcgctcaggaaacccagctggaccatttgggtggtcgattactccggttcgatgtctggagagggcaagaacggcgtggtcaaaggcctgaacgcggcgctcgacccggaccaggccaagaagtcgtacatcgagcccgccagcggcgacgtgaacattctcatcccgtttgaaaccgaggcccaccgcccggtcaaggccactggcacaagcaccagcgacctgctgcatgaggccgatgccaccgatgccagcggcggcaccgatatctatgaaggcctgctgagcgcgctcgacgagctgcccagcgagtcggaagcctcgcaatacaccaccgccatcgtgctcatgaccgacggccgctccaactccgatcatcaggacgaattcgaaagcgcctataagtcgcgcggccgtgatctgccgatcttctccatcatgttcggcgatgccgatcccagccagctgaagtctctcgccaccctgagcaacgccaaggtattcgacggccgctccggcgacctcgccgccgtcttccgccaagccaagggcttcaactgatgctccaggtaatctgtggattcgttgtcggactgctgctcgccgggctcggtttcggactggtcggcggcggagtgcccggcctgatcgtggccgtggtactggccgcacttgggtatatcgccgcctccacgctcaccgagccggagcgacgcatcggcaaaatgctggtttccgccttgcccaacggtcagaagaccgccgatacgatcgacgcggcgaacgctcgactcaactcgatcgccatgctcaccaagcaagtacgtgacccagccgtcaaagccgaagccaacgacttcatcgccgctaccaaagatttagtgcaatacgtgacccgagacacctccgcctacccgacgttgcgccactacatcaccgtgtacggcgagcagaccgagaaactgttgcgctcctacgtggacgtggaaagttccggcgcacgcgatcagatagccacggcacgaatcgaaaccatcgaggcgctgcaagtgctcgaacagaccgccgccggcgaactcagccgggcggtaagcgccaagacgttgggcattacggccgactccgacgccatccaacggttggcccgcatggatggatacgacgacgtcgcaccttcgcctgtgccttcctcggctgctgatgaaggacggcatgcacccagtcagactccatctggcggcccggctcaccagtcggaccagaaaacggacgcacaatgaaactctccaaatcaaaaatcatcggactgatcgccctgcttgcggtagtgggcgtggtctgcggcacgctggtgtggcggcaatcgcaaccagcaccggccgaaccgaccgaacaggtgagcatcaccggctacctgggcggcgagaaaatcggcctgttcgatgacgccaagttcaaggcgctcgccgccaagcaaggcattgccatcgactatcgcaaggccggatcgccggccatgatggatacggaccggaaaggcatgggttacctgttcccctcctcgcgcgcggccgtcgaatacggcaatgcgaaaggcgtcaaggccccccccaaagcgacatcgtcttcaactcaccgattgtgctatacacgcacaaggccgtggcggacgggctcgtgaacggcggacttgtgaccaaggacaattcgggcgcgtatcacatgtgcttgatttggccgtgaaccagacggatgcgttcaagcagatcaaggacgacgtggtcatcgtctacccgacgccgaccgtgtggagcacccacacgctgatggccttggacgagaaaggcgacacactgctgaacctgttgaaaacaccggcggcgcagaagctggcgtgggagcgccacggcttccgcgcggccaacttcgccggcaccgattcgatcagccgattcggcgtggccggcacgctcgaccagatcccggccgtatccgaactgcccaacaacgacgccatgcaacacctcatcaccaccctccaatccgcgcaagccaaactcgtggccgacatctccatgtacgacacgatgtacacgcagaacgcccagcaataccgcgagctgaaaatgaccgtactggccggcaagaaggcgctcgccgacttcaacgccaaccagctgccagcgctggaggccgaggccgccgccagtggcgacgccatgcaggcgcaagtgctgaagaacttcaagtccaagctcgaccgttttgccaagcgactcgacgacctcgaccgcatcagcgtggttaccttgcagaccgcgccgcagatcaaaatcatccagaacgcggaccagaccatcgtggacaagatcgacaccaccatctccaccacgattccggtgtggaagagtcagatggtgatcgcgctgggcctgtccaaccagcgcaaggttctcgacctgcagaacaaggccgacgatgtgaccaacaagctgctggcgcgtaacgcggccgccctgcacaagggtgcagtggacgcggaaaaggccaaccagcgttccgtggtggaaatcgacacgctggagaagatcaacgccgaactcatcgccaccctgaaggagaccgtgcagatccagaaggaaggcgaggccaaccgcgaggccgcccaggtcaagatgcgccaaatcgagtccgacctcaaaaacgccttgctcgaaaacgcccagcagatgtgagccgttcgcgcgccagcatgctcccgttggcggagtttgcgggaacgtgcaaccatgctcccgttggcagaggtatatgagtacgcctactggtgtgcgtatatatgctcccgctggcgggagctggcagccgtaagactggctgagggtggtcacggcgctcggctcggccggctttaccggcagccattcccgccgcaatttctctgtgggcataatcccggaatgattgccgcgctcgggaattggatgaagtgaaggttaaaggttgagagcccgggagggttccggaaccggccacgataaccgctgctagccccgcgatacgggttggcggccggcagccaagccgattctctcctaatcaaggagtaccgattatggcaatgtttccggctttgatgaatgacacgatgttctcggatctgttcgatgatccgttctttgagggttggcgcaacacggacaacacgatgagtgccgtaatgcccgccaacatgatgaccaccgatgtgcgcgagaccgacaagggttacgacgtcgacatcgatatgcctggctttaagaaggaagatatcaaccttgagctcaacaacggctatctgaccgtgtccgcctcgcgttgcagcgagcatgaggacaaggctccggccgctgaggacgaggcttccgacagcaagtgtgcttgcgcgtccgattcgggcaagtggctgcgtcgcgaacgctacatgggctcctgctcgcgtagcttctacgttggcgaggacgtgaaggagtccgacatccacgccagctaccggaacggcacgctgtgcatccaggttccgaagatgcaggcccagccgcaagtcgagtccaagcaccaaatcgcgattgagggctgacgatacttgattcgtcccgaagtcccgcttcgagtagcttcgccccctctgacgagggggctcccgcgaagcgggtgggggagagataaatcgtaaccaaaccatgcttcccacgccgtctgccctacgctttcaacgccgactaacctgacagacggcgggaaacatagccaatgcaaatgccgggtagggatttaccctacccggcattttgctgtttcaatcaccgaaccccaccctgttcgcgcgccggtcgcgtgccgttctgccgctgtacacatccgatgggtagagtgacttcgaaacgatgcgagagaggcggacatatggcgaacggcgcacagaacgcaagcggcacaccggcaccggcggcaagccattccggcggccacgtcgtatccgcgcgcgccacgaccatcggcctgatggcaatcctgctgtggagcttcatggccggcaccgtgcgcatcgtctccgaaaacttcggcgccacgcttggctcggccctgatctacacggtcggcggcatcctgctgctgatgttccggcgcccggccccgattcgcgagttccccaagaaatacctgattatcggcggcctgttgttcgtattttacgaatcgtcgatatccctctcgctgggtctggcctctaccgacgcatcctcggtggaagtgagcctggtcaactatctgtggcccacgatgatggtgctgctgtcggcgggcgtatcccatcgcaagcacgcggtcgtcaaggtgctgccgggcgcgatcgtggccactgccggcgtggtgttggcggtcggcggtaattccgggctcgactggcatgcggccgtgcagcatatcgccgccaaccctttgccctatgcgctggcgttcgtgggcgcgctcgcttggtcggtgtacgcggtgttcacgccagccatgagtcatggggtggacggcacttcattgttcttcccctgcgtggccgtggcgttgtggattatccacttcgcgtccgggcaggggtggccggccgagccgccgagtctggtcgcatggctgtttgtgttgattgccgcggcggcgattggcggtggttatgcctgctggggctatggcattctgcacgggtctatggagcggctggctattgcgtcctatgccacgccggtgctgtccaccggggccagtgcggtgttgctgggtttggcgctgtcgctgccgttttggtgtggcgcgctgctggtggccgtcggatcggtgcttaattacttggtcagtgcgcgcaaatagcggggtggctttgctcatggggcggtaataatcccatggggcggtaataatcccatggggcggtaaaaccctcatggggcggtatcccaaaatgactttattctgcggtttcacaatttcttcaaaccgccccatgggccttttaccgccccatggataaattaccgcccgatgggcagcagcaacttactcgccgcggcgctcggacgggcggcgaatcgggtcaagcagcgtattcggatcggagatgccgaacatgctgcgcccgccggtggattcagggtgcttggcgagaacggccagcgaaatcgcccccggaatcataatgatcaccaaaagggccgccaatccccagttcacgaagaatccgagccccagtacgatggccaccacaaccaccaccgtgacgataatcgtcaacagtgctcgacgtgggttggtttccctggcccaagaggtgctggctgcgggttttgctgttgaactggccgcggcgtttgtggctgttgtgccatcagccgtgacggtcgtgggccttgccgccgcgctcgtcgcggggccagtaggggcgtcagacacgttatcggcggcattgccggtcgctgctggacgttgttcgtttgcgtgagtcatatccaccagcatattccctgcttccggctgaagctgggacaagcctgcgcgccgctaatccagcgctgacactggccttgagctgcggacgtccagaccggatgtgaacaggtgctgaacggagtctggggaaaccatgagaactcgcgacaatttttgtgaaattgggtgacgctctatgaatcgcgcgctagtgttgcgtgagcttacaaggcgaggagcctggagcgcggggggtgaaggatgaagaactccgtttggaaaacgttcatggaattgtctctggtccgcggaatcgtgccacggaccgtgttcggactgaccgcgatcgcggcaatcatactggttattggactggcgctgagcaagagcaataagcgcggccgcctgcacccgctgattgtctcgctgattgccgccgtgctcgccggcgcggctggaatgctggttgcatggctggtgtccgacgtgtttatggtgtttggcgtatcgctgggctggccggtgatcttcaccatcgcgggcggcatcgccggcgtcggcttcgtgatcgccgcagccgtgaccatgcgcggagcccgccgtgtgctggccatcgtgctggtgccgctggtgctgctgtccaccgcgctcggcgtggactcgatttacggcgaataccagaccatcggcaccctcgtcggctacacgccgtacgcctcgctcggctcaatcgaggtacacaaggccgcgatgagcgtcagcgactggcgtagcaaggcgcagaagggcagcctgccgtccatgcccagccaaggcaaggtgctcaccgtcgacattccgaacgccaaatccaacttcacggcccgcaaggcgatgatctacctgccgcccgccgcgctgtccgaccgtccgccggccttgccagtgatggagctgttggccgggcagcccggtagccccagtcgcctcatcgacgccggcaacatcgccgccacgatgaatgcgtacgccgccaaacatgacgggctcgcgccgatcgtgctcgtgcccgaccagaacggcgaggccacgcacaacagcctgtgcgccgacaccacgcaaggcaacgccgaaacctacctcaccacagacgtggtgaactgggccaagaagatgctgcccgtggccaagtcggcccgcatgtgggcgatgggtgggttctcgcaaggcggcacctgcaccacgcagctcgtcccgcgtcatcccgaaatctacggcgcgatgttgccggtggacggcgaactcaagccgaccaacggcagcgtcggcaagatggtccaagagtatttcgccggcgaccgcaaggcatacgacgaacaggtgccggtcaacgccatcgcctccagcggcacatctgagcaggcgctgttcaccggtgctggcgaacgggacaaggaatcgattagcaacatgcgcacgattgccgccgccgcgcgcaaagccggcatggaggtcaccgagctgatcgtgcccggcgccggccacgactggcacgcggtgcaggcggtctggcggcccggtctcgactggtttggcgaacggaccggcttgggcgagatggcgaaatcgttgaaggagtacccacaagtggaggtgttgcaatgagcgaagaatcgcgtaagcacaacagtcatgcggcggaaagctggcgcgaactggccggcgacgtgcgacagtgggcggacggtcatcgactggccatcactgccacggtggcgctggtggtgctgaacttggtggtgtggctggtggtcgcgatggccggattcgcgttcccgctgcggctcgacaccagcatggccgaattcgatttcggcaaactcttctgcacgctgttcttggcgcgcggcgtcatccagctcattcttgatgccgtgctgtggctcgtcatgctgtcaatcgccgagccgtggcttggccgcgcacgtaccgtcggcaccgcgctcgcctgcgcgctcggcggcgtgatcgtgggcctgatcttgtgtgcggcggccggatggctgttccaggactcccaattcgtctcccgcatgcagttcgccctgagcccgctggtgttgccggtcggcgcgcttatggcggccagcgcgttctgcagccatctgttgcggcggcgtattcggctgatcggctacgtggcgattctggtcgcgctgctttacagcggcaatcctggcgattactgcattctcgccgccgcgctgatcggacacgcggtcggccgcgtgatggccgggtcgcccgcgcacgccgaaaccggatggcactggctgcgcagcacctccttcgaggcgcggcgcatgtttgcggccatcgccgtggtgctggcgctggggccgatcatcgccatcacctcgcataatcacgcggggccgctcagcacggtcggcctgctcatgagcccggtctccgtcgacgacggcacgctcgcgcgctgcctggccggcgccacgcacagcggctgcttcctgcaattcgacctattgcgagcctcgatgccgggcgcggtactgcgttcgctgctgcccaccgccgtgaccctggtgctggcgtggggcctgtaccgcggccgtcggttcgcggccacctgcgccgtggccatcaacctgttcacggcgggcgttgccatcgtctattacctggtcgtcccgctgagctttgcgccggatggcatgacctccctgctgcagcacggcgcaatcaccgcctgcgtgacgaacaccttgccgccgctgatcttcgccatcgccttggctgcagcaatgaagcacttcccgattcgcgtcggctggcgccggctgatcggcggcgtcggtgccatcgtgctggttctgctggcgtgcgccgccgtgtacctgatgtacggcattgcccagccggacgccttctcgccgcgcgccacggcctcgtcgctgttggccgaactgccggggcgcttcctgcccatcggcttcctgagccatatgaagctgtcgttcgtgccgcgtacgccattggcgtccgtggtgtatcagggcgttggcctagtgttctggatcgtggtgctggccgtggtgatgcgatggatgagcgacgtcagtgagtcgaatgaacgggcgcaggcccgtgccgaacggctggttgagaccggcggcgaatcgatgagcttcatgaccacgtgggaaggcaacgactattggctgtcgcccacgggcaaatcggccgtggcatatcgcgtgctcaacggcatcgccttgacctgcaccgggccgttcggcgagccctccgagtggatggacgacctgaccggcttcacccagtattgcgtggagcggtcgctttcgccggtgttctacagcgtgcatcgcgaacagcgcgacgcgttgctggaggccggctggagctccatcgaggtcggcagcgaaatggtcgtggacccgcgcggctggaagacgaccggcaagaaatggcaggatgtgcgcaccgccatcaacaaggccaagcgcgacggcgtgaccgatgtgcagtccacgttcctggaagcgtcgctcgatgtgcgcgagcagatcgaggacatctccgaggagtgggcgcagctcaaggcgctgccggaaatgaagttcacgctcggcggtgtcgaggaactgcgcgacccgcgcgtgcggctgctttacgccatcgacgcggacgggcgcgtgctgggcgtcaccagctggctgcccacctggcgcgacgggcgcatcgtcggctggacgctggacttcatgcgccatcgcaccgacagtcccaacggcattatggagttcctgatcgcgcgcatggccgagcgcctgcgcgacgaggggcttgcggatcctgagcatgccgtggagttcatgagcctgtccgcggcacccttggccggcatgaaccccgagcgagacaatgcccgggaaggtggggtggcggccggcgaaggcacgcaggtgctccaacacgcgctgcagatcgtggccgactggatggaacccgcctacggcttccactcgctgttcaacttcaagcgcaagttccagcccgccgaagcgccggtctacgtgtgctacccggacccggcggcgttgccgcagatcgggctcgcggtggtgcgcgcctacgtgcccagcgtgacgcccgccgaagtggccggcatgctcagtacgctgcggtcgtagggtgcggggcggaccctgacaattgtgctcgcggttgaggctctaggccgtttgcctgttcgttcacgtacggacacggagactgaccgattcgagcccaagatggggctatctgctttcaggaggtacatttggcctcttgcggacagctaactgccttcaaagagatacctaaactctgaaatcccgagtatgagcgttgcaatgacggcgtttgtactcggggtttcccgtattcagtacctctttgaacggagatagcattctgcagaagcccgaatgtacctctttgagcggcgaaagcccagcgagaagggcgcagaaggcgctatctccgtttcgaggggctgatttggcctctccgggaggtctactcccgcttcgaggggctgatggccgagtattcacgctccaaaatcggcggaatggcgttgacgcggatgggcttttacatgcggtctagctgccgaccagccccttgaaacgggagtagacctcctgcgaaggccgaatcagcccctcgaaagcggttttgccgttgcagaggtgtcgttgactgcatcgcgagccgcctcgacgtagtaacgtggggcgcatgagcgaacgtaacgaacacaatgacggcaatacgcaaatcgcatacttcgccggcggctgcttctgggggctggagcgctacttccagaacgtcgacggcgtcacggacaccacggtcggctacgcgcaatccaccgtcgaatcgccgacctacgagcaggtatgcgcgggcggcactgatgcggccgaaaccgtgaaagtcgagtttaacccggcacaggtcagcctgcggacgctgacattgctgttcctggaggtcatcgacccgttctccgtggaccagcagggcgaagaccgcggccggcagtaccgcactggcatgttctacacggacgagacgcagcgcgccgtgtatgtggcggccttggagcagctggtcgaccgccagccgcagcgcccggccgtactggtcgaaccgctgcgcaacttctacccggccgaggcacatcatcaggattatctggtgaacaaccccggcggctactgccatgtaccgatcgccgcaatcgcgaacgtaaaacgccgtcagaagtacgtggaacgcatctgggacctgacgcttgaacagttcgcggtcacgcagaacgccgctaccgagcgcccgttcgtcaacgagtatgacgaggagtttgaacccggcatttacgtggacatcgtcagcggcgagccgctgttctcgtcgcgagacaagttcgattccggctgcggctggcccgcgttctcccgcccgattgccggtgacttgctgaccgagcatgaggaccaccgcattccgggccgcgaccgcatcgaagtgcgcacgtcggacacacagattcacttgggccacgtgttcaccgacggcccggccgaccgcggcggcctgcgctactgcatgaattccgccgccctgcgcttcgtgccgcgctcgcacatggccgaggaaggatacggcgactggattgcggttgtggatggggatgatcaggcatgagcatggagaatatcgcgggcgctcgcaagcccgtcaagcgtgaggatgagcacacggtcgccggcgagcatcgcataattcgccgtgccgcgtgggagcgctgtggcggctacgacgagtcgatgcgcggcgacgccaccgccagtcaagccttcatggcccaccccacctacggcgacggcggaatggccgccgccgtacggttgaggagctgatggtcagccggctaaatgccgatagagctctggatcgattggccgggccaaacgcaggaccgacagggtgaccttcacactgccctgtccggttgcgtcaggcttggtggtgagctgaggattctcaaacgcagcgacgtggccaacgtagtagtacttgccatcggcctcttccgccttgcgcatgacgaatagcgggacgaaatgtgtgtggtcccaattcgggccaatgccgctaagcgcccatcggaattccggagactgcggagtgcgtccgttcttgctgaagtatttcatttcctgtgtgctcaggaattcatcctcgtattggctggccgcgtatttcacgaagatgggcatggtgttggtttccttgtcgagcaggtaaccacccacgttttgcggagtgttttccttcttccatccgcacaggcgcatgacgtcagccatggaatatttgcgctcgtacaagaacatgtggtcgaagacctgttgcctggcggcggcctcgcggaacatatctcggcaattggccataccggtgcgcaaagtgtccgcgaagaagatgcggaacgttcggttcgtggcaagtatgtcggcgaatctgctgctcaaccgatatgcggtgtcgcttcctgtgccggtgctgttcaaggtttcgaccaatggctggttgccaaaacgattgcagttcgggccggtgaaatatgaataatcgagcacgctgatcgcagagtcgaattgcgcgtctgaaccatcggccagcgggaattcagtacgaatcgcatcgagcaattcgctgcggccgattggcgagcccgcactccaatgctgaggtacgtcgtcgtcgagccgttcgctgacgaaatggcatagctgagcaagaatgaccaattcgtgcggtcgcaatccgggcagcagcagctccgctgccatcttgagtatcgcgtcttcaacgtcggtcaccggctccaactgatcctcaaatgtcgcttcatgatgtttgcctttgcccaggcttttttcacgggaacgcacgaaatcaagatagttgctgcgcttcgatgcgatggtatacggcagtgaggggtcgtagttatagatgtccgtaagcatggggatgcggcccagctcgtaacggacttggcgatactgttcggacagctttttcatgtcggaccagtcggcggtgtccaaagacttaaggatgcgctccttggcgatcgggtcgaaactgatggacgacaggccgattgactttcgctgcaggttcttgcgagccctgtcgcggtcgccggtgttgccgtataacgccaccggaatcagatagttgttgttgtaattgccgatgaaatcgataaccacaacgctttctttgtgagggaatttgcgcagtccgcgcccgagctgctgcgtgaagataatgctggattcggtgctgcgcaacatgacgatttggttgacggcgggaatatcgactccctcattgaacatatcgacagtgaagagatagtcgagttcgccttcagtgagcttgcggacgtattcgtctcgctgcgcttgggacacgggcctgccgtcatcgtccgtgctggtaacggcagcggtgcgataggggcgttcatcttgttgattccactgctggttaaacagctgggacagcttatgggcttcctcctgtcggctgcagaacacgagtccggtgaccggaatgttgaactgcccatattcctgcaacttgtcaatgatgtagcgaactcgcttttcggtggcaagctgctcgatctcgtacttgagctgtttcgagtccttcgcatcaagacccttggagacatcgagacgatgggcgattccattcggatcgtcgtcggagccaaggtattccgcaacgccgtagtagtggaatggacagagcatgttctcgtccaacgccttttgcaagcgaatttcgtacgcgatgttatgcccgaatagctcgaagatgttgatgccgtcggtgcgctctggcgtggcggtcatgccgagcatgaagtcggcatctttgaaatgattgatgacgcgctgatatccttcggctccagcgtgatgaacttcgtcaaccagaacgtagtcgaattcatcggatttgaattgcgccaaaacctccggctgccgcatcgtctgtaccgtggcgaatacgtagcggcggtcctgttgcttgctggtgcctgaatacaatcccaattcggattcatcacagccgagcaccttttggtaagagttcattgcggtttgaagaatcatctgctgttgggcgatgtacagcatgcgcttcggctggcattcgcgtacgtcgaatgcggaaaggtacgtctttccggtgccggtggccgacacgataattgcgcggcgctcgccttgttcacgaagtttcttgagattcgccaacgcctcctgttgcatggcgtttggctgaatgtcatgcccctcaaacgactgcagaatctcatgacgcggtggggcgtatttcttgaaatcttcctcatactgtttgatccactcttcggtcagcggaacggaatcggccacctgtgagtcgatttcatcctggaactgcccgaccagctctccatccgccagcgatgagactttgagattccattcgcgttgcgtggtcaatgcggctccagtgagattggaactgccaacgtacaggtcgtaatagggcgtaccgtctttcatgcggcgagaaaagatatatccctttggatggaatggctgtccttgagccattgcggccactgaggcattgcgggagccttcccacacgcgaacgtcaacaccagtggtgttctgaagatgcagcagctcccagaatgccctgggatcgttgaaatgatttttcgttgaggtaatcagtgtgcccgctcgggtcgctgtttcatggtgacttctgaagtcttcaaataagctgagcacggcctcagccgagacgaatgcgacagaaatgtcgaaggaatcgctagtagccaaggaattgccgatttcctcgcgcatggtcaatccaccggggcgatttgcgatgagggtcggcttatattcgccgggagcatctgagcgcggctcgatcagacctgagatgacatcttcgaggattgagggtgtcgggccaggatcactatgttgcgtgttggccggagagcttgaggtgctggccagattgatagacatgttgtcttgttcccttgcgattcgaattgtttgttgatgactgcatgactgcatggctgcgctatggcgcattcatcggagcgtcagctgtttgctggcgataatcgcgactgcttcgcgatctaccggagcccagttcaatgtcggcatatcggcaggattcagccatcggatatcagtatgctcggtgagatgcggtgtgccggcgatgaggtgacagacgaatgtagtgagccgtacggtcccaaagtcgtaggcgtattcgctggtgcacacttcttccgcgacttcaacttcgcataacagctcttcttcgatttcgcggtgtaaagcctgccgcgctgtttcatgaggttcgattttgccgccggggaattcccagtatccggccaacgacttccccggaccgcgttgtgcacatagtacggtgccgttggtgacgattgcggctcccacgacgttaatgattttgcgttccggatccatgaacaaccaggatacaacgcttcaagatccacaagcgatccacgatcctcgacagtttcgcaagaacgatcctgattcaatcggaactactggaatcgcagtgttctagggcatttgtggaacgaaaagaaaggctgatcaatggtgaatgaacggcagaccgatacgtgtgcggacgtgatgtacaggcgtgaacggcagagaggctgtggcgaagcagggctggacttcgcccctttcattccctcacaggatgaagttgatcagcagatgagcgcattggatgacaagcttgtgtccaaggctcaggaacaatacgcgaaccgagaaatctatcctttggacgagtgctatcagttggacgggtcgacgtttatctcagccgaggcgtttgaagagattcttggcgacgagcaaacgcattatatggcttggaaaaacggctgtattgataagctgtccattgattattgggagatgccggatgtgatggcctatcttgtggagcgcagcattgcggaaggtgacggcggtgaatgctgttatacggatgctcagccgattgattatgcggaagattgtgcgtactcgcccagcgagatgttggagtgcttaggcgccaattggcaagagcagggtgttgccgatgatggtttgagttacgcgttgtacgggcacccgaatatcaatgtcgagaacgtgtccggttcgatgatggtcgtatcgacggagcagcctgggctttcggtgatggttgattatcgcagcggaatttgggtggtccagccgtttgctcatgacgagtcatttgggtctgcgattcagtttggtgagcggcttgcgcccgttgaggctggccttttgcggcccaatgtctatcagcattttttggaggcgaaacatgcgtttgattacgcaatcgcgtggattgaagatgttggggaaggcgctctcgactattgtggtagccaagagaagcgatccgtttccgaggtgagattcgggagcgatccgactctcggcagtgattcatctacgcagacaagccaaaggagccttgccatgattctcgtcaccaccaccccgtccgtcgacggatacaccatcaccaactaccagggcatcgtcttcggcgaagtggtatccggtgtgaacatgttcaaggatcttggcgcgggcctgcgcaacatgttcggcggccgcagccagggctatgaggaggagctgatgcgcgcccgcaacgaggccatcgccgagatgcagcagcgcgcggaggcgatgggcgcgcacgccgtggtcggcgtggacatcgactatgaagtgctcggcgccgacaacggcatgctgatggtcaccgcatccggcaccgccgtgcagatcgcgcgtacggcctgagctcatcgagcgcagccggggcccgggcccgcccggcgcgccgggctttgtcggttatcgtgacgcattacactgacgctcatgaccatacgaatcgaagcatacgaccagttgcccgacgcggcccgcgccatccgcgagcaggtgttcatccgcgaacgcgactggcggccggaattcgatgaatgggatgccgcgtccgtgcatctgctggcgtccgattcggtcgattcgtccgatcgccccggcctgtccgcgcaatcggcctcgtctattcagtccggccagcccgaccagaatcgccccgtggcgacttgccggttctatgcggaccccgaccatcccgaccagcccgggcgatacgtcatcgcgcggctcgcggtgctgaccgaagcgcaaggcaggcacatcggctcgcggctgctgtccgacgccgaacgccgcatcgcgcaagccggcggaaccatggctgccgtgcactcggaaaacgaccactacaagttctacgaacagcgcggctaccggctcactgacgaggtctatgaaggcggtcgtcacggctggctggtcaaggacctatctcgtaacgtatgaaggcccgcctcggtgctgggcgagcgaacctacagcgcgcagacaatcagataaatcgccacgacgtggcaggcatacccgatgaccgtgcccaagtgaaacacctcgtgaaactcgaaccagccggggacgggattcggcttgcgtagcgcaaagcataccgcgccggcgatgatgaggttccagtgcttggcacatacgagaaaaccccggaacgttggaattccaacgtttcccggggtttctccctgcgtgcgagtggggggagttgaacccccacgagcatacactcactgccacctgaagacagcgcgtctaccattccgccacactcgcagacaatcgactaacttacacccggctgggtaatcatgcaatcttcggcgtgtcgcatgggcggcagggatatatcgctcgtgggtcttctgcgggtgccgtgatctttgacggtggcgacactcccctcagtcacttcgtggcagcacaagccgcaacgaaggagaaaaactcacaaccctggccggcgctcgccgttgccgtagaagtgggccagcgcttcgtcgcggaactcatcaaagtatccgccgtcgatcgaggcgcggatgtcgtctagcagcttcacgaagaaatgctcgttgtggatcgtggccaacgtgaacccgttgaactcgcgggcgcgcagcaggtggtcgacgtacgcgcgcgaataatgctggcatgtgtagcagtcgcatccctcctccagcggcccgaaatcgaacttatgctgggcacgcttgatgttgtaccggccggcgcgcgtgtaaatcgcgccgtttcgggcgcagcgtgcgggggccacgcagtcgaaggtgtcgccgccgttctccacgcaagcgaaaatgtcgtccacagaggcgatacccagcacgtggcgtgggcggttttccggcatcgcgtcgcagatccatgcgcaggtgtcgccgatgatgcgcttctcgatcgcgccgccgatgcccacgccgtcgaagtccagagaggcgatctgcgaggccgcacgtcggcgcagatcctcgtaattcgcgccctgcaccacgccatacaacgcctgatacggcttcccgactcgatcagccgtcagccgctggtgctcgtccacgcatcggcgggcccagcggaaggtgcgctccaccgagtcctcctggtaggagcgggtgttcatcagcgtggtgagttcgtcgaacgcgaacatgatgtctgcgccgattttgtgctggatgcccatcgaaatctcagcggagaaacgatgtgcgtcaccattcaaaggcgacttgaacgtcacgccgtcctcatccacccaggccatgcgctccttgcccttggcgatgatgtcgtccgacttcatgccggtcacgtccatcgccagcgtcttcttgaagccgacgcccagcgacatcacttggaaaccgccggaatcggtgaacgtgggcccatcccagttcatgaaacgcgccaagccgccggccgcgtccagcacgtcctcgcccgggcgctcgaacaggtggaaggcgttggccagcaggcactgtgcgcctagatccttcatctgctcgggcaacacggccttcatcgcggcttgcgtgcccaccggcacgaaggcaggcgtgcgaatatcgccgtggggcgtgtgaatgatgccggtgcggccgtatcgggcaccgtctcgcccaagcccgctggccgtggatggcaggcgggtgatcgtttcgaaatggaaggcgctgcggtcgccgggctgtccgggctgtgcgcccaacggatgttcaagaaggctgatcgtcatatgttcactttaggcagaagggccagaaaagggccggaaattgtgaagaactcggtttcgaggggcggatttcgccgctcccgaacgtctacttccgcttcaaggggctcccggtcaagtaggccggctgcaaaaatggcggaatggcgttaaatgagggcccttgatactcggaattgaccgcgcgaacagccccttgaagtgcaagtagatgttcccgaaacaggaaatcagcccctcgaagccgagatgcccataagactctgcgatgattacgcatagactttcaatcaacgttcagaaaacctccagattgactgcctttactactgaggtagcacacgagaagtggcaatgggcaagtgcccgaatagccgccgaacagacgtgataggaatttaggaaaaggagcagcaatggctgacgaattcaacccgcagggcgtcgaccagaccccgcagaataacgaaaaccccaataatactgccgataccggcaacgtcgagccgaagaacccgtttgtaggcggcgcctcggttgatgccggcaacgccagcgattccagcgagcagcaagccccggttcccccggccgcccccgctgccgatcagcagcctacgcaagccgttaccgacactgccgccaccgagcccatcccggactacgcctccgccaagggcgagagtacggtggtctcctcctcgccggcttctccggcagcgccggccgcagaccagacctcggccacaactccgctgtaccgcccggccccggaatacggcgcttatggaccgaccccgactcaggcacagggccagcagggcggccaggccggcaacaatgcccagcccacgcagcaattcccgttcggccagcctgcacagcaaaccccacagggccagcagggcaaccgcaacccctactacaccaataacccgcagctgcagggcaacggcaatccgttcaatccgcccacgcagccgcagcagaacaacggcaacccgtttgccagccagtccggtcagaatggccagaatggccagcatccccagcagggcggtctgttcggtttcggcgctcccggtaccggtacgccgaacggtcaaggtccgacccagccgggacagcccggtcagcccggtcagcccggccccgccaagcagggcatgtccaagacggcgagcaacatcctcatcgccgtggtcgccgccgttctggctgcggccctctgcctgggcctcggctacggtgccctcaccagcggcctgatcaccttgccgaccagcaactcgctcaccaacgtcagctcgaataagtccggctccgggtccgccaccgccaagagcggcgaagcccccgactggcagactgtcgccagcgatgtctccggctccgtggtctccatccagaccgcgttgagcaacggcaccgccaagggctccggcgccatcatcgacaccgaaggccacatcatcaccaacaaccacgtgatctccggtgcccagcagattcaggtgacgcttgccaacggcaacatgtattccgccacgctcgtcggcactgacgccaccaccgatcttgcggtcatcaagctcgacaacccgccgagcgacctcaaggccgtggaattcgccgattccgacaagctcgccgtcggcgagaacgtgatggccatcggcaacccgctcggctacgacgacaccgccaccaccggcatcgtctccgccctgaaccgcccggtgaccgtgaccgacgacaacaacaacgagatcgtcaccaacgccgtccagatcgacgcggccatcaaccccggcaactccggcggcccgaccttcaacgcggccggccaggtgatcggcatcaactcgtccatcgcctcgactgccacctcatccgactccgccggttcgatcggcatcggcttcgccatcccgtccaacctcgtcaagcgtgtggccgacgaaatcatcaaggacggcaaggtcaagcacgttgccctcggcgtggtcatcaagtccgacacggttgaagccgacggcgtgacccgcggcggcgcgaccatcaccaagtccagcgccaccggcagcgcggtcgtctccggcggcccggccgacaaggccggcctcaaggagggcgacaccatcgtggccttcaacggcaacgcggtgaacaacaactactcgctgctcggctacgtgcgtgccgcggctttgggagacaaggtgacgctgaccatcgtgcgcgatggcaagaccatggatgtggacgtgacgctcgatcaggaggagtcgtcggtgaacggttcgtccagctccgattccaacggcaacagccagaataagcagaacaaccagaatggcaatggccagaacggttacggcaatggcaatggcaacagcgatggcggcaccggtgacggcggcggcttctccgacccgttcggcctgtggtaaagccgacccaacaacgtcacacggtgttgggcggtaaccgctgaacaccgtgccagacaagcaaaggcccgtggcagtgaacaaactcctgccacgggcttttcgtatgcgcgattgtgccccgcgcccatgccgccaacgtagtttcgatatccggcatgtcgcgcaacgctcgttgatagggtaggccaagcactgagttcgggcgacgtcccgaacacagcgcataattcaatacaaaactgaatacatttctttacgccgtgtatcggaaggtcgcgcgggagccgagcaaagcgaagccccaggcaaagccgccggtgggttaacaaggcgtgaccgtagcgccgattgcgcgggccacgcttgccgtaccgcaatcgactccgtatacgagcgtaaggagcaatgatgagcagactcatcagattcttcaccaaaattctcgacatctgcaagcttgtgccgatgcttccggtcgtcgtcatcgccgcaattccgttggctttactaggcgattggcgtccgtggggcaatgcgatggcgattccggtactcggcaatccgggtttcggccagtggctggttatcgcactggtgctgattattgtgattgacactgtgcgcggcatgattgacgatttgcgtcatgggcaggttggagtcgatgtgctggccgtggtcgcgatcctctccaccgtggccgtcgccgaatactgggcaagttgggcggtgacgctgatgatcacgtccggcgaggccattgaggaatacgctcaagccaaggccgagcgcagtctgaccgcgctgatggaggccgcgccgcaaaccgcgcacgtcgtcaacctgcctggcgtggggcgtgggtttgctgccgataagggcgattcgtccgatggcttccggcgcgtgggctcggcatcggctgccgccgccgcgcaccgcttcgacacggtgccggtcgagcaggtgcagctgggcgacgtactcatggtgttgccgggcgaaactgtgccggttgacggcgagctgctgtccggcacggccacgctcgacctgagcaatatcaacggcgagccggtgccgcgtgaagtgttcgccggcgcccgcgtgatgtccggcgcggtgaacggctcgactgcattgaccatgcgtgccacccaggtggccgccgattcgcagtaccagcgcatcctcgagctcgtggcctccgcgcaggaatcgcgcccggccgtggtgaaaaccgctgaccgcttggccgtgcccttcaccgtgctttcgttggtgattgccggcgtcgcatgggcggtgtccggggtgccgacgcgattcgcccaggtgctggtgctggccacgccctgcccgctgctcatcgccgcaccggtggcatacatcgccggaaccggacgcctcgccgcagccggcgtgcttatcaaagcgcaggacgtgctggaaaatctcggccgcgtcacgcaggtgttcttcgacaaaaccggtacgctcaccgtcaagcagccgcaggtggtgcgcgtcgagatgttgcccggcgctgcaacccgtctcaacgaagaccatgtgctgatgatggccggcgcggtggaaagctactcggtgcacatcctgtccaaaggtatcgccaaggccggcgcggaggcgctggccggactgcgccagcggttcgaggatggccagcgcctgtgcccagagccggaggccagctggcctggccatggccgggagtatccggtcgtcaagagcatcaatgaagacgccggcaagggcgtttccggcgaggtgaacggacacgcggtgcgcgttggccggctgtctttcgcggctgctggggaggatggattcctggcggtcgatcggactgttcccagtcggtctgaggatgacctgcgcacacgatttgggctacttcagccggacgaaatggcgtcgtatgtgtctgttgatggtcagttgatcgcgcgcattgtgctgcgcgacgtaccgcgtgccaacgccaaggcagcgctcgccaaactgcgtgagttgggcgtcaccgagctcgccatgcttaccggtgacaagcgggcttccgccaatatcattgccagcgaagtcggcattgacgaggttcacgccgaactgttcccggaggataaggtagccgcagtcagggccgctacaggagccggcaaaaccgtcacgatgatggttggtgacggtgtgaacgacgccccggtgctcgctgttgccgatatcggtgtggccatgaccgacggcacatccaccgccgcttccgaaagcgctcaggtagtcattatgaatgacaatatcgccgccgtgccgcgtgccatcgccatcgcacgccgcaccaagcgcgtgatgcttcaggccgtgctcgcgggcctcgtgctcgccaccgtcggcatgattgccgccgcgttcaaccttatcccggtcgtcgtcggtgccttcctccaggaggccatcgacgtggtgagcatcctctgggccctcactgccctaattgatcgggactgattaagaatatgaggcttctgctgtttttgtaggtcagttgactgaccgggatggtcgtatgtcgagtccaccgcatcgaaacataatcggggcgatacggctggtgacgtggcggaaacggaaatcccacccacgaaagcagcaatagcatcggagttattcattaggtcgatttgacgtttattaggtcggtccttggtcggagcggtccttgaaaccccgccgttccaggggatggcttcagcaccctccgacctaatgaacgaagaaatgacctaatgaatgcaatcgaggtcgtaaaaagccgttggaggtgacgtcttcagtgtcatcaagggattcgccggttgtgcagtattgttattgttctgcggcggctctttaccgtcggccttccagccaatcacgggcggaggtgacgcggattccttgtgagacataactatgctcaacccgactggttacgtactgttgctcacacggtataccgagaacattgccaattaaagtgagatgccgagcgaatcggtcatgataggtttgtccggatttgatttctatgagcatacggttgttgggatcggtgaaatccaacaaatccacctcgaccttgctggcatcgcggtagaagaataattgtggctcctgattggcgttcaaatgctgtttcatggtttccgcaatgatgaggttttcaaatatatcgccgaacttggggtgcgcaaccagtgcttcgaccgtccgaatgcccaagagatgacacagcaagccagtgtcataaaaatagagtttcggcgttttgaccacctgtttgcgtgcgttcgtgtagaacggcatgagatggaatgcgatgtaacttgattccagaattgacatccatgcctttacggttcgcggacttacaccaagttcgttggcgatgttggtgtagtttacgagtgctccggaactgagtgcgcaaagagtcaagaatcgacggaagtcagccaaattgcgtacatcaagatattcggaaacatcacgttcgatataagtgtcgatgtagttcgagaagaacagattgagcggcattctcgtgtcgtaaatgcgtggataaccgccttgcagcataaacgtatccggagtaagggcctgatccgccttgcatgcttcttggaatgagaacggcaataacttgaccaatagggaaacccataatctgacattagcagtgctcgtaggtttcccaaacgcacaaactatggcctaatacacagaattcccaccactcgccctctgttgcaacggaaggctttgcgttaggctagagcgcgtgactgaatctgtgaatactgaactccgcattgctgtaattggcgctggtccggccggcgtctactcatccgatatcttcctgcgccagctcaagaagctgggcgaagaacttggcctcggcaccgaagcgcgcatcgacctgttcgagaagctgccggtgccgttcggcctggtgcgttacggtgtggccccggaccacccgtccatcaagttcatcgcctccgcgcttgagaagacgctcgataacccgaacatccacctctactgcgacgtggaattcggcaaggacgtgactcttgacgacctgctggcccgttacgacgccgtgctgttcgccaccggcgcggtcaaggacaagccgctgaacctgcccggcgccgaccttgaaggtgtgtacggtgccgccaagttcgtcgaatggtacgacggataccccaccggtgcccgcgaatggccgcttacggccgagaacgtcgccgtgatcggcggcggcaacgtggccatggacgtggcccgcgaactcatgcgcaacgccgacgacctcaaggctaagaccgacattccggacaacgtgtacgagggcatcggccagaacaaggccaaggtgctccacctgttcatccgccgtggcgtggcccaggccaagttcagcgtgcaggaactgcgcgagatggagaagctgcccggcgtgcagctcatcatcaacgaggacgacttcgatctggacgacgagaccatcgaggtggccggcaaggacaagctcacccgccagatggtcgaggagctgttcgccatccgcgagatggccgaagacatggaagacgacggcgacgtcgacttcgaaggcaacccggccgaccgaaagtactacgtgcacttcaactccgcccccaccgagattctcggcgaggacggcaaggtcaaggccatccgcgtggagcgcaccgaaaccggtgccgacggcaagatgcaccgcaccggcgagttcaccgactacccggttgaggccgtctaccacgccatcggctaccagcccgccgaagcccccggcattgcctacgacgagcacggcgcccacctggccaacgccaacggcgacggccgcattaccaccgaggccgacggcggcgaagtgcgcgaccgcctgtacgccaccggttgggccaagcgcggcccggtgggcctgatcggctccaccaagtccgatgcgctcgtcatcgtcaccaacatgctcgaggatctggccaaggccgctgaaggtggccgtgtggcagccgaccgcgaccccgaatccatcgaccgactgctggccgagcgcggcattcgcccgatcgacttcgccggctggaagaaggtcgacgccttcgagcgcgccgagggtgccaaggaagggcgcgagcacaagaaggtcatcgagcccgaccagatgcgcgagctcgccctggcctgacggcccgcccacgcccgtccggcattcgtccggcattcgtccacccggccgcgccccgtgcggacgcggccgggctcggggccggacgggccgggcgaatatgggacatttctcgcggcgtatatccagcaatcattcagcatgcgattttagtgtgtgcattatggatgccaaagtacgggtgcacggccatttcaacggcctgaagacaacgctgctgtttgccctgatgtgggctatcatcatgctgatttggtgggccacgggcggcagtcggcaaaccctgagcatctatatcgtcatcggcctgattaccacgttcggcacctactggttctctgacaaactcgccgtcgcctccatgggtgcgcgggaagtcagcgaacaggaagccccggaaatctaccagatcgtgcgtgaactgagcgccaaggccggcaagccgatgccgcgcatctacatcgcccccaccatgagcccgaacgccttcgccaccggacgcaacgaacggcacgcggctgtctgctgcacccaaggcatcctgcagattctcaacgcccgtgaactgcgtggtgtgctgggccacgaacttatgcacgtgtacaaccacgacatcctgacttccgccatcgcctctgccatggccactgtcatctcctaccttggctattcgctgatgtatttcggtggcggctcgcgagacgaccgcgatagttccggtggcctcggcctgatcggcgcattgctgagcgtgattctcgcgccgattgccgcgtctttgatccagatggccatctcccgcacccgcgaatacgacgccgatgaagacggcagcttgctcaccggcgatcccgaggccctggcttccgcgctgaacaagatttcctacggcgcacagaccgcgccgatgcgcaaaaccgccggcacccagtccgtctccgcaatgatgatcgccaacccgttctccgcggtcggtttctcgcgcttgttctccacacacccgccgaccgatgagcgcatagcgcgtctcatgcagatggccaacgaaatgaacggcacgccgatcgctccgcccacctactccacgcgcgtcggcaggtgacgtgctaggataactattcgtgcctcgtttggctgagcatgcttgtcacgtgaggtgcagcagccgtaaggcatgcggacatagttcatcggtagaatgaaagcttcccaagctttagaggcgggttcgactcccgttgtccgctccattgattttcaatgattttcattatttccgggaaagtgtcgcgcacgatcgcaaaactacgctctatttgagcgctttgcccgcggaacccagctgccggcaagcctcgaccacgcgggcggacatggaatcctcagccttacggccccaagaacgcggatcgtagaacttcttctcgcccacttcgccgtcgatcttcagcaccttgtcgtagttctcgaacacgtggtcggcgattggacgggtgaaggcgtactgggtatcggtgtcgatgttcatcttgatcacgccgtagcttacagcttcggcgatttcttccgggcgtgaaccggagccgccgtggaacaccagctcaaacggcttgccgttggggaaatcgactatgccggccgcgctaggcaactcgccttcggccaccgcgcgcgccacacgcgcctgaatgtcgccgagtagcgacggacgcagcttgaccacgccgggcttgtaggcaccatgcacattgccgaatgtgaaagcggccatgtaccggccacgttcgcccaaacccagtcggcgggcgacttcgaggccatcttccggagtggaatacagcttttcattgatttcggcggagtgaccgtcttcctcaccgccgaccgcgccgatttcgatttcgagcacggtgtgcgccttctgcgacttgtcgagcagttcctcggcgatgtccagattttccttgagcggcacggtggagccatcccacatatgcgactggaatgtaggctcctggcctcgtgccacctgatcggcctcatgcgcgagcagaggacgcacccactcatccagatactgcttggcgcagtgatcggtgtgcagagcgatggtgatgttcgggtatttcgcagccacttcatgtgcgaaagccgccagcgccagcgagccggtaacgcgatcattgacccccctgccggagacgtaggccgcgcctcccacggaaatctggatgacgccgtcggactcggcgtctgcgaagcccttcaacgcagcattcagtgtctgtgagctggttacgttgatggctggataggcgtaaccgcctcggcgggcggcctcgagcatttcggcatagcgttccggtgttgcgatcgtcatggcttcattatcgcgcgaggcatgccctctaggccccgttcttcaacctgtgcgctgtgcgattggtcacagcatcgcctcgtacgagtagaaattcgtcacccattccgggttgtcgcacctccagcctcgccctgcgtgagacgaaacttcgcagggtagagggtgtacggtagtctgtttccggcggaatcgtgcgaatgcggaggtgcatcatgcctggaattgttcttattggtgctcagtggggcgacgagggtaaaggcaaggctaccgatttgatcggcaccaaggtcgattacgtcgcgcgcttcaacggcggcaacaacgcgggccatagcgtggtggtcggcgatgagtcgtacgccctgcacctgctgccttccggtattatcaacccgaacctgaccccggtgatcggcaacggcgtggtcgtggacccggaagtgctcttcgaggagattgacggcctggaatcccgcggcatcgattgctcccacctcaaggtgagcgaggccgcacacatcatcgcgccctaccaccgcacactcgacaaggtgaccgaacgcttccttggcaagcacaagatcggcaccaccggccgtggcatcggcccggcctacgcggacaagatcaaccgtgtcggcatccgcgtgcatgacctgttcaacgccgaccatctgcacgacaaggtggaggccagcctacaccagaagaaccagatgctggtcaagctctacaaccgtcgtccgatcgacgtggaccagaccaccgaggagctgctgaagctcggcgaacgcctcaagccgtacgtggccaacaccggcctgattctcaacaaggcgcttgacgaaggcaagaccgtactgttcgaaggcgctcaggccaccatgcttgacgtggaccacggcacctacccgttcgtcacctcttccaacccgaccgccggcggcgcctgcaccggcaccggcgtgggccccaccaggatcacccgcgtaatcggcgtctccaaggcctacgtcacccgcgtgggcgaaggcccattccccaccgaactgctggacgagtccggcgaatggctgcgtcagcagggccacgaattcggcgtgaccaccggccgcccgcgtcgctgtggttggttcgatgcagtcgtcaaccggtacgcctcccaggtcaacggcctgaccgacatcgtgctcaccaagcttgacgtgctcaccggtctgaaggagattccgatctgcgtggcttacgacgtggacggcgaacgtcacgacgatatgccgaccgatcaggccgctttcgccgccgccaagccgatttacgagaccatgcccggctgggatgaagacatctccaactgccactccttcgacgagctgcctgccacctgccaggcctacgtcaagcgtttggaagagctgagcggctgccgtatctccgcgatcggcaccggtccgcagcgcgatcatgtcatccagatcaattcgctggtcgactgaccgtctgcaacgaatttcccggcttgactggtaacgacgcggcacatgatatccgccggctgattccgcgattcgaccacttgaagtggaagatggcggcggccggcatagtcattggtctggtttcaggattgctggttgtcgtataccgtctcggcatcgaatacggcacggatgcgtcccgttggatatatgcgcggattcgcgagaccccgtggctgattgcgccgtgggcggttgccgcggtggcggccgcgctggcgatcgcgtggatggtcggcaaggagccgatggctggtggcagcggcatcccgcagaccaacggcgtggtgatatgcggcttgaagatgcgttggcagacgattctgccagtccgtttcgtcggtggactgttgggcgcgttgtttggtctgtcgctcggccgtgaggggccgtccattcagattggtgcgtcgggcgcgcagtgtgtgtcccaccgtttgcgcggccgccgccgtgaggacatgcaggagcattatctggtcaccgccggtgccgcggccggcttgtccgccgcgttcagcgcgccgctgtccggcatgatgttcgctttggaaggggtgcatcggagtttttcccctgcgattctgatgggcgccaccgccgcatcgctgaccgccgatttcgtctcaaaatactgtttcggtctgcgtccggttttggatttcggtgatatcggtcagctgtcgttggaagagtatgtgtggctgattccgttgggattggtggccggtttggttggttcgctgatgaaccgctcgttgcttggcttccagacgctgtacggcaaactgccggcatggagccgcccgatgattgcgattgcgatcgcgttgcctgtcggcatctggttgcccgatgtgctcggcggcggctcgaatctgattgataccgccgaacatgcgcgcgtcggcttgggaatgctgtgtctgctgttcgtggcgaagatgctgttcacatccacgagtttcggctcaggcgcgcctggcggtattttcatgccgattcttgcggtcggttcgttggccggcggcatctgcggtgaagtgttgcatcgattcggtgatctgccatccgacgcagtggcggtgtttgcggtgtgcgtgatgacgggcacgctcgccgcgtccgtgaaaacgccgatcacgtcgattctgttggctgtggagatgtctggaacgttgacgcacatgctgccggtcgcggccgtcgctttcgtcgcgctgttggtgtccgatttgctgcgcaccaaaccgatttatggggagttgctggagcggtacgtgcgcgcgcaaggcatgcagatggcgatcgcaagccatgtgggcagcggcattatggaactgccattggaaatgggagcgattgcggacggcaagcgggtgcgtgacgtgcgttggccgtctgggtgcctgatcatcggcctgcgtcgcggcgaaagcgagatcgtgccgcgcggcgatacacggctgcgtgccggcgactatctggtggtgctgttcagtggcgaggaggagcgcgaggtgcgacctgcgatgcggcggctgtgtgatgcccggcttgactgagcctggctgaattcggctggactctggatgtacgaatctgcggaatcggacatccagggtgcatacgttggcgctccgtgtaaactcatatgcgttaggaaggcggcaaccgcggcccagctcgttgttgcacggcctatgggcggaacaacgctgtccgcggaaggccagtacagggggagcgcaatggaatcgcaagaacaatcgccgggagacgtggtgactgcgggtgaggactcacatcccatcacgcaggcaatcgacactgttgaggtgatgcgtgctggtgcaaccgcgcccgccgctaacaccatggatccgcctacgattcccctggcgccgatgaaacgtatgcaggcgcggttcaatccgctcgccgacggactgatgtatgttgtggtgttcgtcggtggatttgttggagtcggctgtcggcatgcgttggatatgctcctgccgtcggtcagcgggacgccattcgttgtgggcacgtttgtgtcgaatatggtcgcctgcttcctgttcgcgatgctgaccgaattcatggcgaccgcttcgtggctgcgtcgccgggtgcggcaggttgtcagccgtggcgttgggctcggcttgctcggcgggctttcgacgatgtccggcgtgatgctggaaacgatggaaggtctgcacgagcggcatatcgccagtgcgcttggctatcttgcgggaaattttgcaggcggtttgctcactgccgccgccggcgtggttctgatgcaggcactgctgtcacggagtactcgaaagcgggttcggggtgcgttttcagctgtttccgtgtccgattctgccgaatcggacacgcagggcgtacgccatgtgaaagtggccgacgtggcgcgttctgccgcgcaggccgcaatggaagccgcgcagacggcccagcagattgcacagacgggacaggttccgcgagtcgaaacgccaaccgtgccgccgactgccatccagcctatgcagacaggccacgttccgcagattcctccgctggtcgttcctcagctgacacagtcatcgcagccgttgttgcgcgagccggatacttcagacttggggcagctgcccgagccgattcagcagtcgcaaccaatccagcagccccagcagcagtcgcagccaatccagcagccggccaacccgcttccacccagcttcgagcccaaaccgatcactgcggagatttcgcttgtcgccgacccgactaccggggaggtgcgctgatgatgtggatgatctgtctgttcggcggtctgggagccatggcccgttacgtgctcgacgtgtcaattcaacgaggctggaaccgcgagaatcgaagaacgaaccgcaacttcccgctatccacgctcgtcatcaacggcgtcgcctcgctatgcgcgggcatcgccatgatgtcctactattcgcaatcggtggatatggacacggtcatgatgttcgttgtcggatttctcggtggtttctcaacattctccacggcgctcaacgaagtggtttcattgattcgccagcgtcgttttacgctggctctgggctatggaatagcaaccgtcgcggtgcctctcatttgcgtggccgccggtttcggcattgcgctgcttgccaatccggcgtaattttcacgttacacggacggtcgctgagtaacgtgaaagaaatctgagcgccaccgccatcaaggccgccagtccggatgcaacgctggtgattgcattcgaccagaccaagccgctgctgaaggccttcacctccgcaggagtcgacactaagaagctgtatttcgttgccggactgtcgaacaggttcgagagaatgtaaatgaatgtaatatttcgtggtaagcacgtgagcatacaacgatagaacagtgataacggggaaggtgcgatcatggtcggcatgcgcgatgtggcgaagaaggccggggtgtctctgagcaccgtctcgctggtggtgaacggcaacgggtacgtgtctgatgacatgcgcgaacgtgtgcgcaaagccatgcaagccctcaattatgtgccgaacgagcttgcccgcaatctgtatcatgattgcacgaatctggtcggcgtcatcgtgcctaccatccgccacccgttctttgcgacgtttaccgcacatctgcagcatgcactcgccgcgcaaggattacgcactatgctgtgctctaccgcagatgaggcggatggcgaaatccagtatgtcgacatgttgcgtcggcacatgatggacggcatcgtcatgtgtgcgcacacttcgcatcccggcgattattggacgtcgattcatcgcccgatcgtcgcgttcgaccgtgtgcttggagacggtatttcgtcaatcggatccgaccacgagcagggtgggcgattgattgcgcagatgctgatccgcaatggtgccaaacatgtggtgatgattggcggtccgcgagatcaattcttcgatttggctgcgcgcggagaagtcgaggaaggaccgttcgatttgggaaagaccacgttcccgacggtgcgctactacctcacgttggaacaggaattgacctccgcaggcgtgaaatacgagtatgttgaagctggcgaagtgatggattttgccggctatcatcgtgcggtcagcaatgcgctcgacaaggtgacgaccgacggcgtcgatgccgtggtcagttccgatattggtgcatcgttctgcgtgcgcgaagcgttgggccgtggaatttccattcctgacgagctgcagatcgttgcctacgatggtacgtatttgactgatttggccggcatgaagctgaccgcggtcgcgcaggatttctcggcgatcgcacagtcggcggccgaccatatcgtgcaggcgattgccaatgaggaagtggccgcggctaacgcttcacgcaagaacatccccaagccgttcgagccgaacgtgcttattcccatgacactggtgccaggcgataccacgcgttgatactgtgcgtcttcatgcgtgtgcccggtgtggatcgcatcgatttcagcggcgtccacaaccggcgaacgcccgtcgatagtcgtgctcatcattcgacttgtgcacatgtgtccgattctgccgaatcggacgtctgagttccgaaaaatgtgttctgtgtgtccgattctggagaatcggtcatgtgtgatgtgaattgggatgtttggatgtccgtttctgcagaatcatctttgctctgtactcgttgattcgcaaatacggcgcatggctcgtcataccggccatgctcggcggcgcggccttcctggcggactcggtgctgacgccggccgtgtcgatctcgtccgccgtcgaaggcctgaagacgctgccggcgttggagcatctgttcaccgagaacaaggatctgacgatgatgatcaccgcggtgatcatcgtgatcctgttcgccgtgtagtcgcgcggcaccgaatcgatcggcaaggtcttcggctcggtggtgatggtctggttcgcgttcctggcgatcgtcggcgtggtagccatcggcaacgactggtccgtgctcgccgcactcaacccgtactacggcatcaagttcctgttcagtccgaataacgccaccggtctggcgctgatgggcaccgtgttcctttcgaccaccggcgccgaggcgctgtactcggatatgggccacgtgggccgcggcaacatctacttcacctggccgttcatcaaggtggcgctggtgctcaactacttcggccagggcgcgtggatgctgcgcaaccagaacaaccccgaactggccgacgccgaggggatcaacccgttcttccagatgatggatccgaacgtgcgctatgtggccgtcgtgctgtcggtcaccgccggcatcatcgcctcccaggcgctgattacgggcgcgttcaccatggtctccgaggccaccggcctcaactggatgccgcatctgcaggtctgttaccctgcccgtacccgcggccagctgtacattccggtcgtcaacgtggtgctgtgcgtggccacgctggccgtgctgctgctgttccgcgattcggaacatatctcggcggcctacggcttggcactgaccatcacgatgatcaccaccacgatcctgctgggcatctacctgtggcaccgcagcaacaagttcggcgccgttgtgttcaccatcgtgttcctggcgatccaggtcctgttcttcgccgcctcgatggccaagttcctgcacggcggctggttcacgctgctgctcacgctggcgatcctcatgatcatgtacacgtggaacgagggcaccaagctggagcgctcgcagcgtcggcacatgatgccgaaggacttcctccccgcgctggacaagctgcacggcgatagccgcatccaccggttcgcggacaacatcgtctacctgaccagcgatccggacctgaagcgtctcgatacggacatcttcttctcgatcttcgccgaccaccccaagcgcgcccgcgcatggtgggcggtggccgtcgagaccaccgacgagccgttcacccgtgagtattcggtcgagagcttcggtaccgactacctgttccgtgtgcgcatccgcctcggcttcaaggtctcgcagtccatcccggcctacctgcatcagatcatgcacgatctggagaagaccggcgagctgccgaaccagcagtcgatctacccgaagcttgacgccgatcccggcatcggcaccatccgctacgtggtgatccacaaggcgctgatgcccgagtcgaaggtctccggccgtggcgccctctcgctgcagatcaagtacgcgatccgccgcgtggccggttccccggtcaagtggttcggcctggcgccgtacaacccgctggtcgaggtgcagccgctgttcgtgtccacgcgccgcccgccgcgcctgacccgcgtggccagccaggcgcccaagcgcgagggctgagccggcaggccgaacagccggtgcgagccgggtggcctaatggcatgtcagggggccgcgaaccgtcatcgtacggttcgcggcctttgcatatgcgaatgatgcagagtgggcggtactgcttgtgaatgtagcgggtggacgggtgacgtggttgatgccttttgccgtatgttcacggtggctatgcgtcggatgggactgtaattcgacttcttgggatcttttttgctgcagtggtgcgccaaaaggtctcagccgtctctgcgccacgccttccggcagtcagtacaaggttgtactacactggtggctgtcacacggatgtccccggtcgcccgcgcctccgcggtacatcgttgtatggatacgtgtcacgtatgcagagtgcatgcagatatgtagaaaggaatcccatgccccagcaggaccatctgaccgcacgtctcgtcgtcgatgacgattttgaggtcgctccggtcaacaatcgtctgttcggttcgttcgtcgagcaccttggccgttgcgtgtacaccggcatctacgagcccgaccacccgaccgccgacgagcacggcttccgcaaggacgtcatcgacctggtcaaggaactcggcgccaccaccatccgctacccgggcggcaacttcgtgtccggctaccgctgggaggacggcatcggccccaagcaggaacgtccccgtcgactcgatctggcctggcattccaccgaaaccaacgaattcggcctgcacgagatggccgaatggcttgaggccaccggcggcaacgagctgatggaggccgtcaacctgggcacgcgcggcctgcaggaggccctggacctgctggagtacgcgaacgtgcccggcggcaccgagctgtcggaacgtcgccgcgccaacggcgccgacaagccgttcgatatccgcatgtggtgcctgggcaacgagatggacggcccgtggcagctcggccacaagtccgccgaggactacggcatgctcgccgcctccgtggccgccggcatgcgccagatcgatctggacgtggaactggtggtgtgcggctcctccgcccatggcatgccgaccttcggcaagtgggagcagaccgttcttgagaagacctacgagaacgtgaacttcgtctcctgccacgcctactaccagccgttcttcaaggaggacggcacgcgcgacatggccagcttcctggcctccggcgtggatatggacggcttcatcaaggacgtggccgccaccatcgacgccaccaaggcccatctgaagagcgcgcacgacgtgtacatctcgttcgatgaatggaatgtctggtaccagggtgaggagccgagcaagacccccgagggcatcggcaactggccggtggccccgcgtctgctggaggacatctacaccgccgccgacgccgtggtgttcggcgatctgatgatcacgctgctcaagaacgccgaccgcgtgcgcgccgccagcctggcgcagctggtcaatgtcatcgccccgatcatgacggagccgggcggcccggcctggcgccagaccacgttccacccgttctccgtgaccgcgcgcctggccaagggcggcaccgtgctggagccgaagctgtccgccggcaccgtggatacgccgcgctatggcgaggtcgacggcgtgaacgccgtggccgtgcgctgcgccgacggctcgctcgccgtgtttgcggtgaaccgttcgctcgaggcgaccgccgagttcgagatcaggctgcaggacggcgcgcagccggcatccgtcgaggcgcagacgctgcacgacgacgatctgttcgccgcgaatacgctctacgaccagaaccgtgtgaccccgcacgccaacgggtcggccatgtacgatgccgagtccggcgtggtccgcgtctccctgccgccggtgagttggaccgccctgcacatcaagtgacgcgatgggccgcgcggtccgttccggagaaggacggatcgcacggcccttgcttcccgggccgggcggaagggaccggaccggccggggaaaacgcgttatgctggaatcagacgggcgttccgcctgaaccgtgcggaacatgcccgatggtgcgacgagaggggtgctgtggcgaaacgggtgaccatcaccgacgtggcgcgcgagacgggcgtctccatcaaaacggtgtcgaatgtgctgaacaacaccggcagtatgcgcccggagacgcgccagcgtgtccaggatgccatcgaacgcctcggataccgcgttaacgtgtccgcccgcgccatgaaaaccggcggcacgaagctcatcggactggccatcaccgatttctgccagccgttcatgccctatctcgccgacagcatcgtggcggcggcacgttcccgcgggtacgcggtgatcaccgatacctacaacagcgccggcggcttggcgcaggcgatcccggagacgaagaagctggccgcggacggctggattttcttcatgggctcgccgatcacggatcgcacgatactgcaccagccgtatccgttggtgattgtgggcgattacgatacgcagggactggccgattgggtcacgatgccgaacgtggaggccgtacgcaccgcggtgggggcgctgctggattcgggatgccgtaggatcgcgttgatcggcggcaccgcggagaacgcatgcccggatgccgaccgcgagtcgcggcccgaaaccaccagcacgatgcgtacccgcggctatgtgttggcccatgaggagcgtggcctgcaggtcgattggcggctggtccgtaacgcggattgggtgcagtccggcggccgcgatgcggtggcggggctgttggacgatccggatgcgccgcgtccggatgcggtcatgtgcctgaacgacgcgctcgccatcggggtgattcatgagctgcagcggcgcggcgtgcgcgtgccgcaggatatgcaggtcattgggttcgacaacgtgccggatgccgagtactgcatgcccggattgacgacgatcgacccgcatgtggatgattacgcgcgacatgccgtggatatgctgatcgcgcgcatcgaggggtcggcggatccgttccgcacgtatgtgacctcctacgatctggtgcgtcgtgcctcgacgtgttgacggcccggcgttcgcctggacatgggtctgtgacgggctgctgtcgcctctcccgtggcgtattccgggagaggcgacatgcgggctaggatcggagcagcacctccgtcagcgcttgacggacggcgctcggcatatgcgaatcggagcaatcttccatgtccggcccgctgacgtgctcgagtgaatccatcgtggccaatgcgtcgatgccgttctccgctatggcggcataagcctgttccttggtcagatatcgcatttcggcatgccgaaggatgtcgaagacgtcttccatgcggggatcggcggccatcgtcgtgtcgccgatggtgacacgtatctcgctgcgggtggatacgtcggcgaccgttacctgcaatgtgagggtttcggcatcataccggcgatccgaatcgacggatgcgccgtcagcctgtacggatatgtcgctgtcggtaatgcctcggaacaggaaatcccatgttctccgggccggcagagcgtgaacgtctccctgggctggcgataccgtgagtgcggatgtggcgccgtccttgcgccatcgataggtgatcgcggtggtcgccggggtgatctgccgagagtaatgtcccgaatcctccatcagcgtgaagtcgccgtccgctccggggaagacgatgatctccagatgctgcgggttgtcgacggagttgatggaatccccctcggacaggggctgcatcggcacgatgccgccggccttcgcgaacacgggaattccgtcgagcggacgccagacggtcatgcgccgtccgttgggcgaagacgcgctataccggcgcccggtgaagaagtcgaaccagtcgccctgcggcagccatacgtcggccttgccccgtcgggaggatttatccatcggttccgtgatgggcgcggccagcagttcggtgccgaacatgtattcgttgggaacgtggtatgcggcgtcgatgtcgggcgatccccaatacatgggctccaccaggggaaggcctgtccgggatgcgcgccagttcatggtgtggaggtacggaatcatgcgatggcgcaggcggagcgcatcgtccatgatcgcacggagggggtgcggatgtttttttggacggtcaggcggccagtccaagacttctgcggtattgcacggggctcatccagtccagtgacttcttgatcctggtttcattgtagtgggtcaggtaggcggccaggcgttcgcggaactcctcgtagcccacgcccctccagtcccgcccgtagaataactcgttcttgagcctgccgaagaacccctcggcggccgcgttgtccgggctgcatcccttggcgctcatcgaccggatcagcccgtgctcctcgcagatgcggatccattccggccaccggtaatggcaacccctgtcactgttaaaccgacatcggtttaactccgattaagccggttttgttgttaagccggggaacggttcggggtcttggtggctggccgtgtcccatgtggtttcccggcttaacgttccgggttatttgagggtgtgtagttgtcggagtcgttgctcgctgagccatgtctccttggaggggtcggggccggggttggccgcatcgacggctttgcgcatcatgtcgagggtcgcgaacgcgtagaacgcgctggttgtgctcatgctttcgtggccgagcagttgcatgatgagcggtagcggcacgccctgttggtagaggtccatggcgcgggtccggcggatcaggtggcagtggacgcgttcgggcatggacgggcacgtcccgcggcgtgctctggccgccgcggttttgaggatctcgtcgatccggtccacggagagcggctggatggcgccgttcctcgtcgagtggaacaacggcctgtcgccgtcgcgcatggacggtccgggatggaattcctcgaggtaggcggccaggtgggttcgtgtcctttctcccaggggcacgacccggctcttgccgcgtttgccggtgagcgtgaccctggccggcttatccatacccacgtccgcgatggtcagtgcggcgagttcgccgatcctggcggcggtgtcgtacatgaggatcaggagcatgcggttcctgcgcgatttggcgtcgccggtgccccatgcggtcagcaacgctttggtgtgctcctccccgaggtggtcgacgggtttgcgcgcgggtggtttgacacgtatgccggccgcgtcgttgcccagcgcggtcaatgccgggtgttcgaggcccgcgtggtcgaggaacacgcgcatcgtcgtcatcctcagcatgatggtgcggtccgagtacccgcgctcggtccgcatccattcgacccaccggcccaggcgcgcccggtcgaaatgcccgaaaccgatgtggctgcgctgcgtgccttccgtggtttcgagccatcggacgtaggattccaggccgatgcggtacgcctcgacggtcttcggcgagctgccccgcaccttgggcagccagtggtgcagccagtcgcgcgcgactcgccagaagtccggttcaccggagctggcggccgttttccttgccttgctcatggttcctccgtttccgggaccacgcgttcggcgtcggcgacgaggtccgcgtatccgtccatgaaatcggggctggcgtgcacgtagtagagggtgctgtcgatgccggcgtgtcccatgtaggccgccagatagggcagcatcgccatcacgtccacgccgtcgcgagtccaccgctcgatgttcgcgaacgcgaaccggtgccggaaatcatagggcctgggccgtttgccggcttgtggccactcgagcccggcccgcgtccagacgcggcggaacaccacgccgggcatgcccggggagaccggattgccggtggaggtgacgaagaacgtgggacggtcgtctccgaagcgttcgcgggaccgttggtcgcattccagcagttcggcggcgacctcgtcgcccacgggcagcctgcggctgcgaccggccttggaatcgaccacgtcgatggaacgggccttgtggtcgacgtgcccgacggcgagtctcctgacctctcgggtgcgcagcccgcagcaggccatgagcatgaagaacgcgcgagactgccacgcccacggcgacggagactccaacgttcccgcggcccgcaggaacagggcggcctcgcggtccgtcagcaggtacggcgtcggacgcggggatccggccttccactggtcggagagcacgtacgcgtcgggatcgtgggccagtcgcatccacctgccgaagtccctgatgtacgagaaccacgagcggcaacccccgggattcgcgtcgatcctatgggcgatccatcgctccacgacgccccgctccagacgcacggccccgtgttcgaggcaatgccggtcgaacgagcgcaggacctggacgcgggtggcgccatgcctgcccatggacgccttgaagcggatgtactcctccaattcgccggcgagcgggccgacgaatccgtgttccgtgggtctcatgacgatccgccttccggcacgggcagcacgcacgcgagcattcccccgcggtgcgtggccatgtagacgcgtgtggaatcggggtcggcgtggccaagcaccgcgctgatcgtcggcaacggcgtggccgcctccagcatcctcgtcgccgcgttgcgccgcaacagcctggaaccgccccggcgtccgagcccggcgtgccgcatgacacggctgatcgcctcgtacaccgatgaatgaccccgaagcgcgacatggggcgccttgtaccgcacgaacacacggtcgtcgtcggtggcgggcctttcgtccaacagccaggacgccagcctcgcggccagcggtcccgtcatcggcacggtcaacggattgcccgtctttcgctgcaccagacctatgctcatggaatcccaatccacgtcggcgatcctcagaccgatcacatcgcatgccctcagcccgcacgtcagcgacagcagggtgatcgccgcgtccctcgacggcaccgaccgcgaggcgcacgcctccagcaagcggcggtgctcgtcgtcgggcaacgttcccgcgatcgcgtgggtcctgcgtatgccggccaggccgatcgcgtccgccaggtcatcccgcccgagccatctgaacaacgggcgcaggtccgacgcggcgtgccgcatcgacgactccgaccagcgtgaacgcagcccggccaggaaccccagcacatgcgagccatccgaaccgtccaacgacacgaccccatgagattccagccacgtgaggaacaagcccgccatccgacggtaatgccccaccgtcgccgaagccagtcccgaaccggcgagatacgcctcccaacgctccatgaccacggccaaacccggaaccaccggctccgcaagcctgctcctgcgccacttgcccaggtccaccgaaccggaccgcagatacgagtcgcacaaacgcgccagcctgccgtaatcgaaccaccgctgcctgctgaaaccgcccgtccgctcactgaaggtcgacgcggcgaaccccgcgcccaacccacgcgtgtacaccgcatccgggcctccggcgtaccgttccaacgccctgatggacttgcggtactggcctatggtggattccatataaccggccccgtaaagcgcgcggaccacctcgcccgcgacatggccaaccgtcgtctcacccatggcaaactccttcgttcgaatcaaatgggacaagacgaacataacccggaacgttaagccgggaaaccacatgggacacggccagccaccaagaccccgaaccgttccccggcttaacaacaaacccggcttaatcggaatggatgattggatgttccccgtccctgagcgtggcgaccgcgtcaaggagcatccggttcgccatgtcggcgttcggggagcgcgacaaggtccaggagaccaccatcccgtcgaagcagtcgaccaccggggaaagccagcacttgtacccgtccatggtgaactgggtgacgtccgtgacccacagcatgttcggcgcgtcggcgtggaagtcccgctccacgaggttcgccggggcctcgccgatctcgccggcgtaggagctccaccgcttcggccgcttcaggtacacgggccgcatggccccctcgcgcatgatccgcctgacgaccttctccgagacgacgatcgggtcggactcgtcaaggcgcagcatgcggtggatggtccggtatccccatgcgcgcccaccctgctcgaacaggccggcgacgcgggcccgcagcacggcgtacctgtcgcccgcggcgatcgcgccgcgctcgtaatagtaggtgctgcgtttcagccccacggccttcagacaggccgccaggccgaattcacccctgatcgcgtcgacgacccgcgtcctctccctgttcgtcagcatggacgggtcgaggcgcgggtcgtcggcttttaaaacatcgatcgtctcccgcatcaccgcgttctccagccgcaggacctccacctgccggcgcagctcctccacgtcatcgccggccgcgggcatcggttcggccggcatcggcgcgtttctcctgtccatcagtcccagtatcccctcgctccggtagcggcgcatccactggtacacgctcgtcggcgtgcaacccgcgtcgcgcgccacgcgggcgaggggctcgccctcgagcgcgcgtctggccgcattcgtcttgcattccagcgtatacgaacgcctgcacgcgcccgtgatctcgtcggcctccgcgtccagcatcgcgttcaacagctgttcgaccttctccgacaccaaccggtccagcttcgtctcgagcatgttctcgtcgacctgtagaatctgattcggcatggttccgtcgccttcctaaataggttgatttggtttggcgactgaaatcgtacccggacgacggaccatgtctctcaactcaagcctcaaccaaaatgcgcaacaaaccgggcgttaggggctgcggacattttcttggagataatcacgcagccattccttggctttgacggtattgtaccgggctcatccaaccaagcgactgtttgatgcgctcgtggttgtaccagcgtatgtactcatcgaccaaggcgagcacctcgttgcgggtgtgttcctcccacttctcggggtagaccgcctcggtcttcatcctgccgaagaatccctccgcggccgcgttgtccggcgaacagcccttcgcgctcatggagcgcgtcagcccgaagcgttccatgagcccgagccatccgggccaccggtaatggcatccacggtcggagttaaaccgatgtcggtttaattccgattaagccgggtttgttgttaagccggggaacggttcggggtcttggtggctggccgtgtcccatgtggtttcccggcttaacgttccgggttatgttcgtcttgtcccatttgattcgaacgaaggagtttgccatgggtgagacgacggttggccatgtcgcgggcgaggtggtccgcgcgctttacggggccggttatatggaatccaccataggccagtaccgcaagtccatcagggcgttggaacggtacgccggaggcccggatgcggtgtacacgcgtgggttgggcgcggggttcgccgcgtcgaccttcagtgagcggacgggcggtttcagcaggcagcggtggttcgattacggcaggctggcgcgtttgtgcgactcgtatctgcggtccggttcggtggacctgggcaagtggcgcaggagcaggcttgcggagccggtggttccgggtttggccgtggtcatggagcgttgggaggcgtatctcgccggttcgggactggcttcggcgacggtggggcattaccgtcggatggcgggcttgttcctcacgtggctggaatctcatggggtcgtgtcgttggacggttcggatggctcgcatgtgctggggttcctggccgggctgcgttcacgctggtcggagtcgtcgatgcggcacgccgcgtcggacctgcgcccgttgttcagatggctcgggcgggatgacctggcggacgcgatcggcctggccggcatacgcaggacccacgcgatcgcgggaacgttgcccgacgacgagcaccgccgcttgctggaggcgtgcgcctcgcggtcggtgccgtcgagggacgcggcgatcaccctgctgtcgctgacgtgcgggctgagggcatgcgatgtgatcggtctgaggatcgccgacgtggattgggattccatgagcataggtctggtgcagcgaaagacgggcaatccgttgaccgtgccgatgacgggaccgctggccgcgaggctggcgtcctggctgttggacgaaaggcccgccaccgacgacgaccgtgtgttcgtgcggtacaaggcgccccatgtcgcgcttcggggtcattcatcggtgtacgaggcgatcagccgtgtcatgcggcacgccgggctcggacgccggggcggttccaggctgttgcggcgcaacgcggcgacgaggatgctggaggcggccacgccgttgccgacgatcagcgcggtgcttggccacgccgaccccgattccacacgcgtctacatggccacgcaccgcgggggaatgctcgcgtgcgtgctgcccgtgccggaaggcggatcgtcatgagacccacggaacacggattcgtcggcccgctcgccggcgaattggaggagtacatccgcttcaaggcgtccatgggcaggcatggcgccacccgcgtccaggtcctgcgctcgttcgaccggcattgcctcgaacacggggccgtgcgtctggagcggggcgtcgtggagcgatggatcgcccataggatcgacgcgaatcccgggggttgccgctcgtggttctcgtacatcagggacttcggcaggtggatgcgactggcccacgatcccgacgcgtacgtgctctccgaccagtggaaggccggatccccgcgtccgacgccgtacctgctgacggaccgcgaggccgccctgttcctgcgggccgcgggaacgttggagtctccgtcgccgtgggcgtggcagtctcgcgcgttcttcatgctcatggcctgctgcgggctgcgcacccgagaggtcaggagactcgccgtcgggcacgtcgaccacaaggcccgttccatcgacgtggtcgattccaaggccggtcgcagccgcaggctgcccgtgggcgacgaggtcgccgccgaactgctggaatgcgaccaacggtcccgcgaacgcttcggagacgaccgtcccgcgttcttcgtcacctccaccggcaatccggtctccccgggcatgcccggcgtggtgttccgccgcgtctggacgcgggccgggctcgagtggccacaagccggcaaacggcccaggccctatgatttccggcaccggttcgcgttcgcgaacatcgagcggtggactcgcgacggcgtggacgtgatggcgatgctgccctatctggcggcctacatgggacacgccggcatcgacagcaccctctactacgtgcacgccagccccgatttcatggacggatacgcggacctcgtcgccgacgccgaacgcgtggtcccggaaacggaggaaccatgagcaaggcaaggaaaacggccgccagctccggtgaaccggacttctggcgagtcgcgcgcgactggctgcaccactggctgcccaaggtgcggggcagctcgccgaagaccgtcgaggcgtaccgcatcggcctggaatcctacgtccgatggctcgaaaccacggaaggcacgcagcgcagccacatcggtttcgggcatttcgaccgggcgcgcctgggccggtgggtcgaatggatgcggaccgagcgcgggtactcggaccgcaccatcatgctgaggatgacgacgatgcgcgtgttcctcgaccacgcgggcctcgaacacccggcattgaccgcgctgggcaacgacgcggccggcatacgtgtcaaaccacccgcgcgcaaacccgtcgaccacctcggggaggagcacaccaaagcgttgctgaccgcatggggcaccggcgacgccaaatcgcgcaggaaccgcatgctcctgatcctcatgtacgacaccgccgccaggatcggcgaactcgccgcactgaccatcgcggacgtgggtatggataagccggccagggtcacgctcaccggcaaacgcggcaagagccgggtcgtgcccctgggagaaaggacacgaacccacctggccgcctacctcgaggaattccatcccggaccgtccatgcgcgacggcgacaggccgttgttccactcgacgaggaacggcgccatccagccgctctccgtggaccggatcgacgagatcctcaaaaccgcggcggccagagcacgccgcgggacgtgcccgtccatgcccgaacgcgtccactgccacctgatccgccggacccgcgccatggacctctaccaacagggcgtgccgctaccgctcatcatgcaactgctcggccacgaaagcatgagcacaaccagcgcgttctacgcgttcgcgaccctcgacatgatgcgcaaagccgtcgatgcggccaaccccggccccgacccctccaaggagacatggctcagcgagcaacgactccgacaactacacaccctcaaataacccggaacgttaagccgggaaaccacatgggacacggccagccaccaagaccccgaaccgttccccggcttaacaacaaaaccggcttaatcggaatgcaccaggggacgcgcgttccccggcagcgtcgaggccgctttctccagcatccggttggccagctccgcgttggggctgaagccggcggtgtatgcgacgatcttgccatcgaagcagtcgatcatcggcgagaggtacaccttcccgtccctggccttgatctcggtgatgtccgtcagccacttctcgttcggacgctcggccgtgaagtcccggtcgacgagattggcgggagccggcgtcgtctcgccctcgtaggaactatacctgcgtcgcttgggcacgtgcgccacgagcccttcctccgccatgatcctgcggaccaccttctccgatacgccggtcttgagcaccgccttgatcctgcggtacccgtacctgcccttggaatcggcgaacgccccggccacctctgccctgagtccggcgtacttgtcaacgccgagccgggcgtggtggtagtggtagctgctgggcgcgatggcgagcaagcatgtcatcgagctgagcgaatacgccggcctcaaccggtcgatcaacagggtcttctccctgttcgacaggcgccgcaggtcggcgccggggtctttttttacgacctccaccacctcccgcatcaacgcgttctccagctccagttcctcgaccctgcggcgcaaagcctccgcgtcatcatcatcggctgcggacggccggcggcgggagtccgcgggcttattgccctgcgcggagttcctgtttttgggctgcaacgcggccatgccgcccttgcggtacgccctgacccagccatgcaccgcgccgacgctcacgccgagctgtttggcggcctgcttctgctgcatgccgcccagcaccagctcgactgcccttcgcctggtctccagtgggatgatgggtttggccatatggccagcataccgggaatccatcgccagccaacgctccagacactgcctggtcggataacccagatgctccaccacctgggccgtcgtcatcggcgtggtgaaatacaactccaccgcacgctctcgttcctcaagactgaacatacgaaaatccttccgttcggtctccaagaaaacgtccgcagccccttatcaatcggacacattggagtcggacaggctaagctgcatagaacaccgcatctaatcggttcgacacgcgcatttcactgcgcgactggacattgacgtccctttcgaggtaatatcgaaccggttcgatacatacgtgagtatgcaaatacgtaaacaacaaacaggcagatgcgcacgcaaattgcacccgcgcccatgagccaagggaggtcccatgaaaaacaaagtgcaactcatcacatacgccgatcgtctcggcgatggcactcttagctcgatgaccgacatcctgcgcacccgcttcaacggcgtgtatgacggcgttcatatcctgccgttcttcaccccgtttgacggcgcggacgccggcttcgacccgatcgaccacaccaaggtcgacccgcgcctcggctcgtgggatgacgtcgccgaactctccacaacccacgacatcatggtcgacgccatcgtcaaccacatgagctgggaatccgcccaattccaggacgtgctgaagaacggcgagaactccgagtactacccgatgttcctgaccatgagctccgtcttcccgaacggcgctaccgaagaagacctggccggcatctaccgcccgcgcccgggcctgccgttcacccactacaacctcggcggcaagacccgtttggtatgggtcagcttcaccccgcagcaggtggacatcgacactgattccgccaagggctgggaatacctgatgtccatcttcgatcagatggccgccagccacgtgcgctacatccgtctcgacgccgtgggctacggcgccaaggaagccggcaccagctgcttcatgacccccaagacctttaagctcatctcccgtctgcgcgaggagggcgtcaagcgcggccttgaaatcctcatcgaggttcacagctattacaagaagcaggtggagatcgcctccaaggtggaccgcgtctacgatttcgccctgccgccgctgcttctgcactcgctgttcaccggtcacgtcgaacccgtggcccactggaccgagatccgcccgaacaacgccgtcaccgtgctcgatacgcacgatggcatcggcgtgatcgacatcggctccgaccagctcgaccgctccctcaagggcctcgtgcccgacgaggacgtcgacaacctggtcaacaccatccatgccaacacccacggcgaatcccaggccgccaccggtgccgccgcgtccaacctcgacctctaccaggtcaactccacgtactactcggccctcggctgcaacgaccagcactacttggccgcccgcgccgtgcagttcttcctgccgggcgtgccgcaggtctactacgtgggcgcgctcgccggccgcaacgacatggaactgctgcgccgcaccaacaacggccgcgacatcaaccgccactactactccaccgccgaaatcgatgaaaacctcgaacgcccggtggtcaaggccctgaacgccctggccaagttccgcaacgagctgtctgcattcgatggcgagttcagctacgaggtcgatggcgacacgtccatcaccttccgctggaccgccgccgacggcgcgtccacggccgccctcaccttcgagcccggacgcggcctcggcacagacaataccaccccggtcgccagccttgcctggagcgatgccgccggcgaccacgaaacccacgatctgctcgccaacccgccgattgccgatatcgactaaccgttggcccataaacgccactccgctgtgcgcgctccaagtagtgcgcccggcgtaagctgggttcatggagagcaaaccgcccgcagtgcactgaagccagtgcgctcgggcggttttgcgtatgcggggttgaaggtcgtgctcctgcgggcgcggcccaagcatcccgccggaatcgacgagacgagcagcagaacagagaaagagcagcatcatgttggaaccgtatgtgcgcccgggtattgatgatcgcccggatttggacaaggtcctaagtcccgaagacaaagccgccgtggccagactggccatcaagaatcgccgccgcccgcccgaagcctctgcggaccagcctgaggctcaggctgtgcgattggcttccgccggttcttcggcagccgctgctgcagccgccagtgtggacactcccgcgccggatatgtcgtccgcctacctcgacatgcgcgatcccatggtcgccgtcaatggccaacgccctaccgcaggtcaggtctcccgactcaactggggtttcttcgctgcttcaattctggtcggcgcaccttgggtggcgttgaacaccattgccatgcccaacgcgattgcgcgtacattcggctatgacactgctgttgccggtcatatcgccatcaatccggccactggccgcccgttgcccgtcgccaccgaattggcgatgccgctggcggtgctggtgattgtcggcgtcgtggcctccatgttctcgatgtccctggtctccgccctgtccgaccgcacacgcacgccattgggccgtcgtaccccgtggatggttggcggaggtctgctgtgcgcgctgatcacgctgattctggggcagaatatcggcatcattgtgctttgtattttctgggtgttcctacagttcgcctatgcgatgctttccgtgccgttgaccagcgccatcagcgaacgggtgcccgacaagttccgccctcgcatcgaacgctggcatggcatcggtgtgatgctcggccaagcgcttggcgtgtgcatgggtgcgcttggtgtgatgttcaattcgtttacgccgtttagttacaccgccgtgctatttgcagtgtccggtattgccaccgtattgattctgcccaaggagccttctagcactgagcagccgaaccagctttttgaccgcagtcaggtacttgaccaattgcgcccgccggcccacgctcccgagttctcccggatgttcgccgcccgtacgtgcatgatggccggtgttgggctgaccggtgtgtttctgtggtatctcgtacgtttctgggtttatggcaaggccgtggtacttacgtccgcgccgctgaccattccggccggattcctcattgccggtatggctgtggccacattgatcggtgccgcgctcgcctcctgggccgccgggccgatttccgagcgaatcgaggaaaagaacattcccgtggcccgtgtggtggccggtgcctgcctgctgtatgccgctggtttggcgctcgcatggggccttggcgtctggtccaccggcactgcccgtgaaaacggcatgttgctgtttgcgttgatttccggattcgcctttggcgtctatgattcgctcggacttgaactggtgatggactctttgcccgacccgcgccgagccggccacgacctcggcatttatgcgctcgccaactcggccggtctggcgctcgccgccatcatcggcgcgctactggtgaacgccttcgagcatagcttcggctattacctgctcttcccgtccgccatcgtcatggtgctgctggccggaatcgtcaccctcaccaccaaatctgccgaataataaaccggttcgagtacactggtcagcagtgatccagtccagtactcgcaggggagcaaaaccatggtcggcatgcgcgacgtagccaaagcggcaggggtgtccttaagcaccgtttcgttggtggtcaacaacaccggctacgtctcggccgatatgcgtgccaaagtcgagtccgcgatgcgccagctcaactacattcccaacgagctggcccgcaacctctaccgaaaccgcaccaacaccatcggcgtgatcatgccgaccatcgcccacccgttcttctccacactcaccgcgcatctgcagcgcgagttcgccgcgcgcgacctcaaaaccctgctctgctccaccgccgatacagacaagggcgagagcgagtacatcgacatgctccagcggcacatgatggacggcatcatcatggcggcccacaccgagcatccggccgactactggacctccatccatcggccaattgtcgctttcgaccgcacgctcggtgagggtgtgccggtcgtccggtctgatcatgaacagggcggccgtctgattgcgcgccagctcatcgattccggcgcgcgccacgtggtgctcgttggtggcccgcgttcccagttcgcggaaggcaccactttccccacgattcgctaccatctcaccgttgagcgtctgctggctgaggccggcattgcctgcgattatgtcgaagccggcaccgtggccgacatcgccgcccacgcagccaccgcatgcgccattttcgagcggtatcccgatgtcgacgccatcgtcggctccgatgtggtggcatccgtggcattgcaggaagcctcgcgccggggtatcgagatgcctgctgatctgcaagtcatcgcctatgacggcactctcatggccgaaaccgccggcaaacgcctgaccgcgattcgacaggacttcccggccatcgccgccgcgctcgccgcccgcatggactcacagattgccgccgacggtggccacgcctctccggccaagaacgatagcgcttcggacgttgacacccaacccactcccgaagaagtcatccccgtagccctcatccccggcgaaaccacccggtgactcctatcttggctcccctctctgaggctgagctgtgaagcaaacagtccggtggactgtttgtaggcgaaggcgagccgggaggcgagcaggcagactgcgggcggtagcccgtctgtaattgcggccgagctggcggcgtaggcgactgaggggagccgagtcacggccgcccacagtcacccatctcacatgactcctacgtcacaatgtccacaatgtgaacccttgctggattggcaagacatacaaacctatgtttacattccagttcaggtcgaacggcctgaggaaataccgaaaggaggccacgcgatgactggattcaatgcttctgcgtttgtatccgcacgaattattagcccgtcttcgctggcggactaattcggcactgatgcttgaagccccgtcaacgaaggcagggccaatcaagctgacacaatcggcacggccctgcatgatgcggggctttttttgttgcgctcacaaggcttacggcagaatcccgcagacggaaacggtagcggacagtacacggcaacaacacagcgacagaacaacaacctccctgtggggcgaaataatcgcccgccgatgagagtgaacgagagcaaaacaggagtaacaatgactgcagcagtcgaagagactggcttagggcaggcggcaggtaaagccgctaccttggtacgcgattcggtcaagaccgtgatcgccgcgtcgatggtcggtaccgccatcgaattctatgacttctacgcctacggcaccgccgcggcaaactacttcccgcacatcttcttctccgcgaaggacaaccccaccgtcgcactgctgatgagcttgctgaccttcgccgtcgccttcatcgcccgcccgctgggctcgctgatcttcggccacttcggcgatcgcatgggccgcaagaccacgctggtcgtcagcctgatgaccatgggtgtcggcaccttcctgattggctgcctgcccacctacgatcaggtcggcgttggtgcagtcgccatcctctgcctgctgcgtttcatccagggcatcggcctgggcggcgaatggtccggcgcggcactggtcgccaccgagaacgcgcctgaagacaagcgcgcactgtacggctccttcccggagctcggcgccccgatcggcttcttcctgtccaacggcacctacttcgtgctcgaatccttcaacaatcaggacgcgatgctggcttggggctggcgtgtgccgttcctgctgtccgccatcctggtgatcgtcggcctcgtggtccgcgttcacatggaggagaccccgatcttccgtatggctcaggagcagaagaaggttgtcaagtccccgctgaccgaggtcttccgcaagtcttggcgtcaggtgctgcaggccaccttcctcgtggctgtgacctacacgctgttctacacgctcgccacctggtccctcgcttggggcaccaaggagcagggcgaaggcggcggcaaccttggcttcaccaaccaggaatacctgctcatgctcatgatctccatctgcgtgttcgccctgttcatcgtgctgtcctgcctgtacgcggacaagatcggccgccgtcgcgtgctgaccttctcctcctgcgcgctcgtcgtgttcgccgtgctcttcccgttcctgctggacggtggtctggtcggccagaagaacttcttcgccaacatggtgttcctgtgcgtcggctttgccctgatgggcatcgccttcggcccgatcggcgccttcctgcctgagctgttcgacgccaacgtgcgttactccggctccggcatcggctacaacctggccgccatcgtcggcgcggctttcgtgccgaccatcgccacttggctgagctcccactggggcgtccactccgtgggcctctacctcgccgtgatggccgtgtgctgcctcgtctccgtgctcacttgcaaggagactaaggacgttgactttaccaagtgacgatgttcacaacgtgaaaaacctcaattccactaagtgaacccctgcagggcttttccgatgcgacgggactaaacctgcatatcggaaaagcccacaaggaaagccacaacagaatatcgctcagcgaaaccccgcagaacgcaagaaaatttcaaccccataaataaacaaataaataaaaggagcgccaaaaatggcagcaactatctggtacgagaaggacgccgatctgtccgtgttcgatggcaagaaggtggccatcctgggctacggttctcagggtcacgcccacgcgctgaacctgcgtgactccggtgtcgacgtggtcgtcggcctgcgtccgacctccaagtccgtggagttcgccaaggagcagggccttgaggtcaagccggttggcgaggccgttgccgaggctgacgttgtgatgattcttctgcctgaccagtaccaggcagccgtctacaagaaggacattgagccgaatctgaagccgggcgctgccttggccttcgcccacggtttcaacatccactacggctacatcaagccgtctgaggatcacccggtgttcatggttgccccgaagggcccgggccacatcgttcgtcgtgagtacgccgctggccgtggtgtcccggtcgtcgttgctgttgagcaggacccggacggcaagacctggccgctgtgcctggcttacgccaaggctctgggcgctctgcgtgcaggcgccatcaagaccaccttcaccgaggagaccgagaccgatctgttcggtgagcaggacgtcctcatgggcggcatcaaccacctgtgcgacctcggcttcgacgtgctgaccgaggctggctaccagccggaaatcgcctacttcgaggtgttccacgagctgaagatgctcgtcgacctcgctaacgagggtggtctgaacaaggctcgttggtcctgctccgacaccgctcagtacggcgactacacctccaccgtcatcaccgaggagaccaagaagcgcatgcagtaccagctcaagcgcattcaggatggctccttcgccaaggagttcatggatgaccaggctgccggcgctccgaagttcaagaagctgcaggaagagtactctcacccgcacctcgagaccgttggcccgaagctgcgcgccatgttctcctggaataacgccgaggccaaggacaaggatgagaccgagtccttcaacggcaagatcgctcgtacccaggttcagtgattgccgcccctgaaggggatttaagctagcaaaccgccgttcccgcccatacgggagcggcggttttgtgttgttgcgcgcagcgaatcattctcaataacaactatgcgctgatttcttgcaggcaaacgaacaccgaatatgcaagatcgttgatatctcagcctttccccatatgtgggattgtgcgattctgttcaaaagggtgcagagttgttatcgagaatcgttctctgcacacggctgtccatactccaatagtgacctagctcacgttgtggactccagcggggctgcgacggcgttctcggtaggattgaactcggtttgaaggacacaatcctcgcaaaacaggacttatctgcacaccgtagatacccccggcgcccagcggcgccacaacccactactgaaaaggagtgccaataatggcagcacagatctggtatgagaacgacggtgatctctctgttctcgaaggcaagaaggtcgcaatcatcggctacggctcccagggccacgcccacgcgctgaaccttcgcgattccggtgtcgacgtggtcgtcggcctgcgtccgacctccaagtcggtcgacttcgccaaggagcagggcctcgaggtcaagtccgtggccgaggcttccgccgaggccgacgtgatcatgattctggcccccgaccagtaccagcgcaccatctgggccaacgacatcgagcccaacatcaagccgggtgccgctgttgcgttcgctcatggcttcaacattcactacggctacatcaagccgtctgaggatcacccggtgttcatggttgccccgaagggcccgggccacatcgttcgtcgtgagtacgccgctggccgtggcgtgccggtcgtcgtggccgtcgagcaggatccgcgtggcgacggctgggctctgaccctggcctacgccaaggccctcggtgccctgcgcgccggtgccatcaagaccaccttcaaggaagagaccgagaccgatctcttcggcgagcagaacgtgctcatgggtggcgtgaacaagctcgtcgagatgggcttcgaagtcctgaccgacgccggctaccagccggaaatcgcctacttcgaggtctgccacgagctcaagatgctcgtcgacctgatgaacgagggcggtctgaacaaggctcgttggtcctgctctgacaccgctcagtacggcgactacgtcaacaccgtcatcaacgaggactgccgcaagcgcatggaataccacctgcagcgcatccaggacggctccttcgccaaggagttcatcgacgatcaggatgccggcgccccgcacttcaaggagctgcaggagaagtactccaacgagcgcatcgagaccgtcggcccgaagctgcgcgccatgttctcctggaacaaggatggcgtcaaggatgccgacgaggccaactccttcaccggcaagatcgcccgcgcccaggttcagtgattttcgctgattagcgcatactaaaaggccgccgctccgattcattcggaacggcggcctttcgcttattccaagggatttacttgattacccacgcagaggtgtcggtgggaagttggccgtcgggagtcagcgggccggaagtgagcaccacagagccttcgggcagtgagaccggggcagtaccaaagttagtaaccgaggtgaacgtgcgtccctcaaccgccgcacggcggtacgccaccacgtccgctcccatatccacctgctcggcggtggtgtcgcgtgtggcggtcagcgactcctgacgaatcgccaacgccgcatgatacaacgcgaacatcgaatccgggtcggcctgctccacgtccaccgcgtaatccttgaaccacagcggctgcggcaggtgcgggtcggcggccggcgtcacgccatcggcgcgaaccgcaggggagaagccgaaggaagcgcccgtgccgaactggccggcggcgcacagcggcacatggttctcgccggtgccatcgtcggccggaatcggacggctgaaatcggccagagcgggctcgtcggaagcggtccaaggcagaggcacgcggcagccgtcacggcccttgtccatcgtgttgcgggcggtgtggaaagcggtaggatcctccagtcgatcccacggaatatcggccacctcaaacagacccagctcctcgccctgatagatataggcggcgccgggcagaccaagctccatcagcgcggcggcacgggcacggcgagtgcccagctcgcggtcttccgggtaggtggtaccgttacgcagcagccagtcgtgcggcaactggtggtagggcgcgcccttgacctgcggcagaccatagcgggaggggctgcgcggcacgtcatgattgttcatgacccacgtggtggtggagccgccggtttcggccgccgccttaagacccgcggcgatggccttgcggaactcgtcggcataccagttggcctgcgcgaagtcgaagttgaaggactggcccagctcgtccatcgaagcgtacaggtgctggtgctcgggcaccacccacgcctcggccacggcgaagcgcggcgggttgtattcgttgaacaccttgcgccactcgcggtagatgtcgtgcacctcgcgacggtcgaacagcgggtggctgaagtcgtggttcagcacgccgaccacgctgtattcgcggccgagctcctccagcggcttggattcgagatccttggccaggccgtgcgccacgtcgatgcggaagccatcggtgccgtggtcggaccagaagcgcagggtctttttgaactcctcatggatgtccggattcttccagttgacgtccggttgcgccttgtcgaacagatgcaggtaccactggccgtcgggcacgcgcgcccaggccgggccgccaaagaaggactgccagtcgttcggcggcagttcgccgtgctcgccgcggccgtcacggaagatatagcgatcgcgtgcgggggagccaggttcggaggcgagggcttccttgaagaacacgtgcttgtcggcggtgtggttgggcacgatgtccacgatgaccttgatgccggcctcatgcgcggccttggccatggcgtcgaagtcgtccatggtgcctaggcgcgggtcgacgttgcggtagtcgatcacgtcgtagccgccgtccgccagatccgaggggtagaacggggagagccagatcgcgtcgacgccgaggttcttcaggtagtccattttctcggtgacgccggcgatgtcgccgagcccgtcgccgttgacgtccttgaagctgcgcgggtagatttggtagacgacggcctgcttccaccagtcgtcattgaggttgttggcggtcatgccgattccttcctgttccgggtgcgttgtggttgggttgttccggttgtgctcgaactgctgtgtgaaggcccaaccgttgtattgatgatgacaacgatatcatgtgaattacgcatgcaaaagtcgatttatcggcgttttgcggtggtaacgtagtcacgcctgcgcggacgctgctgttgcggcaggcggcgcggtggtttcgcgcagtattagcggagtgtccggccgtacgaatgccggttcgattgacttgcccgcaatggcatccaataccatgtgcccggcggccacgcccattgcgaacgggtcctgatgcagtgtggtcagtcccacggcggcggacagagtggaatcgtcgaagccgatgatggagatgtcctgaggtacccgccgcccgtattgacgcaggcgatacagcacgggcgcggccatttcatcatcctcaaaacagaaggcggtgatgctgggggaggcgttcagtacggcgttcaatgccgcgttgctttcgccaagaccgcgttgaatgctcaggggcgttagctcgatccccggatgggcggcagcggcatcaatgacgccctgcaaacgagcctcggcactgtagcgcatgttggtttcggtcggggcgctgccgacgaacgcgatatgccggtggccgagtgcaatcaggtgctcgatggccgaacgtgtggcggcgtaatcgtcaatgctcacgcctgcgttgaacccatcggtggagggaatgttgatgccgacaatcggcacgtgcatatgcttcagtcgctccacttcagccggctcaatgtcgaaggagctgacaatcaccgcatccgcattgcgtcgcacgggcaaatccgcaaagaagtcatggcgctcggcggcgttgcgcatggggtagggcacagtgtcgtagccggaggggcgcagcgccgagtcaaggccggcgaagatgtttgcattgaaccaggtggtgatggtctcgctggccagcagcgcaatgcggaacgactggccggacttcagtgcggcggccgagcgagagacggagtagtcgagcttttcggccgcggtcatcactcggtctcgagtctctggaagcactaggtccggcttggcgaaggtccgggacaccgtggatacggaaacgccggcctcgcgggccaccgcttgaatgcttgccttggtcatatgccgtcgctccttcgccgtcgcgaacaatcattgtcatgacaacgataacatgcccataacaagtcatcgtcttcggctatctcgattgcgaggggggctgatttagaccaatttcccattgccggaatcgatcaccgcttctctcggcgcatcacggcggctagggactgcacgcgtggcaggtcgaagacctcgtcggtatgtaccacgtggcctgagctgtccgccagcggcacgcgccagttcgaatactctctggaagtgcccggctgattctgggagcggcattcgcccacgccgtccaccagcgctgcctgcagcagcagcgacggcgtatcggtgagcatggcgtgcatcgcttccacgatttcctgcacatggccttccacatcatccgccacggtctgcgagatatagccgttctccaccagacggttcatcatggccgtgcgctcggccatcgccgaggcggcgaatgcctccaccggctcgctcaggagatgcagctcctcgcgcagcttgacgtgtgcgaagttcaggtagccggcggtgggtggcagatcgtgcgtggtcaccgaggccaatgcctgtttgcgatagtccttgggtgcgcggtacgggtcgccggcgttcggcgaatcgtccacgcggttgaaccattccacgtcagtgccgagcacgccgtgatcggccagaatgcggcgcacgtaatccggtacggtgcccagatcctcgccaaccaccatgcctccggcgcgcgtggcctcgatggccagtactcccaacatcgcctcgtggttgtacgtcacgtatgcgccgttgcgggcaccgagcccctgcggaatccaccacaggcggaacaagcccagcacatggtcgatgcgcaccgcgcccgcgtgctcgtacatcgaatgcaccatctcgcggtacacctggtagccggtggcctccaggtagcgcgggttgaacggtggctggccccaatcctggccctgctggttatagaagtccggcgggcagccgaccgtgacgccacctgaggcgaagcgttccggattggcccaggcatccgcgccgagcccgtgcacgcccacggccatgtcctgcatcagccccagcgtcatgccgtggtccagcgcctcctgctgcgcggcgttcacctgctcggcagcgatccactgcagccagcggttgaactcgaacaggtcgtggtgctcctcgacgagctggcgcacggccgggtcgtcgatggtcttctcgaagaaccaacggttctcgccccacggcgcgccccatacctcgaagcacaggcaccatgtggcgaaggaatcgaggtccgggccggcggtggtcttgaaatgctcgaattcgagctcgcgcttgttgttgcggcccgcttcgaagatcaggcgcagcgccgggcgcttggcctcccacaccgcgttgatgtccatcggggtcgattcgtcgttgcgcgcggccaccgaatcatgcagcgcatccacctgcgcgcgcacgtcggccggcagtgtggcatattcggggatatcctgcggccggatgtacgtcacgttgaggaatcggcgcgattccggtagatacggcgatggctcaagcggcggaatcggcgcgccggcgtgaatcggattgatgagcatgaagtcggccttggacttctcggcggcatctgccaaaagacgcttcagatcgccgtaatcgccgatgccccacgattcgcgggaccgcacggaatacatctgcgtcatccagccccaccgctggtgctcggcgaccgcctccggcacgggaatgcgcgcgggggcggcgatgatggccgccttgccctcgcgcccgtcaaccgtgacggtcagcgtgtggtaacccatcggcaggtcgggtgcgatggtcaagtccggcttgccggaattgaggttcggcagcagggcaaagtggccaaacgcggtgccgtcctccagttcgatggaggcggtgatgtccgcgtcagacgagcagttcagggtgatgccggtcggtttgccggtggtggcgacgatggtggaggggagcaaacgtttgctgttttccacctcaagttgggtcatggagcgtacgatggcctcgtcgctggatgcgtccacgtcgagggccttgagtacggcgaccaaggccgcgtcgctgatttcggtgtaggtgccgagctggtcgatgaatgaggtggcaagtccgcaggctttggcgagcttgatgagcgggcgggcgagtcgttccgtgctttccgcgcgctgcggggcaccggaagcggcgttgttggtggtgtctgcgatggtgccggtgctggttgctgcgtcgttgccgtatgcgtcggtcatgatgactccttgcttgcaaattgggtactgctagtcgtttgcattgctgttcgagggccgctctgcgttgaggttccggcaatctgacagaccaatgttcgagctgttctgtctttaccgtaactcatattgacaacgattgcaatacattcggtgagttggacgaggctagaggtgttggtgtttgtcgtgatggcccgttgactatccccagtcgactttgccgacagcctcgccggcggaggtgaggtcgaacgggtttaaccaaacacgacgaacgattgcggggagagcgtcagctgcccgccgctcacggccggttcaccaagactgagcagcacgtcggcgtcggaagagagctcgtccggcaggtattccgtgaggaatgaggcgattgaggcacctgaatcggcgttgaaataactggaatcgccttcgtgctccataggcgtgtcggtattgcgcagcaacaggttgtagccgttcgggtggccgtcccggcgccagtcgaggtagaggtccatgtcgaagccggcctgcatcgattcgttcggatggcctggacgccatcggcggaccgacctgggtggattccgataaggcggccgtatgggtgaccaactgggacaccgagcgcaacggctcctcgctcaccacccgtgacggcaccagctacctgctcgccaacgccttcatgctcgcctacgattacggccagccgcacatcttctccggctactactacgccggcgtcgacgacggcgctcccggcgccacccgcacctccgtgccggacatgacctgtccgaccgacggcatcgaaaccgccggcacctggcactgcgcgcaacgctggaccgccatccgcggcatgatcggcttccgcaacgccgtggccggcaccttcaccggcaccgtggccaagggctcggccgtcgccctatacgccggcgcgacgcccgcaaactgggccggcacccggaaatacgatccgtccgatcccgcctggttcaccggcgaaacaccgcataagggcgatgacaccgccgccaagtccgccgattccgcagcgtccgccaagtcaggcgacgccaagtccggaaaggcaacgtccgatgccatccgccgcgccgcaacgctcgccgccatcctcctgcccgtcaccgtcggcgtcacgttcatggcgatagctcgcaggaacggcaaagcccagtccgacaacagcggcccgaataacgactgattcggccccgctcagccgcgcacccgcggcgcggcggtggagtcgcgtaccagcagttgcacggggaagatctcgtgcggctggtccagggtgcgcccctcgataaggtccagggccttgcgcgcggcggcgacggccatgtcgtacggcttctggcgcacggtggtcagccccacctcgcccgagaacgtgctgttgtcgaatccggtgacggacaggtcggtcggaatcgccatgccgcattggcgcaggcggaagaacagcggaatcgccagcgaatcctgatggaagcacagggcagtcggggcgtcgtcgcgcgcgagcagcgcggtgagggcggcgtcgaccggatcgtcgccggcctgcatgtccatcgtctggccggtcacgccgtccagttcgctgcacgcctccaggaatccggtgacgcggttgtgcgagctgaagcccatcgtggcatcgaacgtctcgtacaaatacaacaggttgcggtggccgagcgtggtcagatggcgcacgatcagccggatgccggccttgtcgtcgatgcccacggaggcggtgaacccctgcgaggccgtgttgatgccgatgagcgggatccgcgtggtgttgagtcgcctgatttcggccggggtgatggcgaacgacgagacgatgaccgcgtccgcgttgccgcgcaccggcagttcgtcgaagaactcctcgcgcgcgcccgcgtcgccgatcggttggatgaccagatcgtagccggccgatcgcagcacttcgttgaggccttcgatgatgcgcgaggtgaaccagtcgagcttgctgctgcccaccagcagcgccacgcggtgggagcggcccgatttgaggatgccggccatgcgggataccgagaagtcgagttgttgggcggcctccatcaccttggcgcgcgttttggcggagaccatgtcagggcgggagaacgcgcgggagaccgtggcggtggagacgcctgcttgcctggcgacgtcctcgatgctggctttcatggcccctcccggtttttcaaagttgacggtgtgacaaacttctcttcattgtaaatcattgcagtacgttttacgacagtcatagtgcaatgggttgcgatattgcgacacgccgaaaatatagaccaatatggtctcaatagctttggaatgtaacaggttgcaaatgtaacggtttgcatggctgagaaagccgggttgccgaactagttcgacacccgtatactgaaccgtgttcacttagagcttgcgaggaagtaagggagataatgaagatcaagaaatctctcgccgcgctgactgcaaccgtgagcattatggcacttgcaaccggttgcagttcgagcggttcgtcacgccgtccgcctcgacggcgccagcgactggcgcatcttccaccaggtggtgctgccgatgagccgcaattccatcgccgcgctcgccatcttcaccttcctgtggaactgggaggactacctctggccgttcctcatgatcaccgatgacgacaagcagctgttgtcggtgggcctcaagatgttctccggccagtacggcaccgattacggcggactgttcgccgccacctccgtggccatcatcccggtggtcatcgtctacctggtgttccagaagcagttcatcgccggcatcgccaccggctccggcaagtaaacccggccggtttcggccgaatccgaaccgcgccgcagtctcccaccagtcccggagagccgcggccgcatcactcgtatcatcgtggataaccgtacagaaagagtaaccatggcacaatcgccacaactcaagcattcgtctccgacctcgcccgatccgcaggacttccgcctcgacgccacgccggccatgcgcgccgacaatgtggtgtccggcgaccactggcgcatcggactcatcaccgattcactcgtgcgattcgaatggtccgattccggcgtattcgagaaccgcccgacccagaccgtcctgaaccgcgatttcggtagcccagtcgaacgccgcgtcaccgagcgtgacggccgcgtcatcatcgacaccgcggccctgaccatcgtctacgaccagcagccgttcagcaaggaaggcctgagtgtggtcgtcaaaggcgtggccgacacccagttcaacacctggcattacggcgacgcccagcgcggcaacctcaaaggcaccgcccgcacgctggacgaggcggacggcgccattgagcttgacaacggcgtgatctcgcgcgacggctgggccgtcatcgacgattccgccgccaacatcatcatcgaaaccgacacagtgaacggcaaggcgaacccgttcggcacctgggtatccccgcgcgccaccgccgaaacggacttgtacttcttcggctatggccaccgctacatcgaggccgtacgcgacttctatcgcctgaccggccccacgccgctcctgccgcgcttcgccatgggcaactggtggagccgctactaccggtacacgcaggacggctatctggccctgatggaccgcttcaagcgcgagggcatcccgttcaccacctccgtgatcgacatggactggcatcgcgtggacgacgtggacccgaagtacggttccggctggaccggctactcgtggaaccgcgaactgttccccgacccgccggccttcctcgccgacctgcaccggcgcggcctgcgcaccacactgaacgtccacccgcgcgacggcgtgcgcgcgttcgaggacgcctaccccgaagtcgccaagcgcgtcggcatcgacccggccaccgaggagaacgtggaattcgacctcaccaacccggacttcgtggacgcctatttcgacatgcaccaccgcatggaggccgaaggtgtcgacttctggtggctggactggcagcagggcggcgtgacccgccagaagggtctcgacccgctgtggatgctcaaccacatgcactacctcgactcagggcgcggcggcaactggccgctcaccttctcccggtacgccggccccggctcccaccgctacccggtcggcttctccggagacacgatcgtgacctgggaatcgctcgccttccagccgcagttcaccgccaccgcttccaacatcgggtatggctggtggagccacgacatcggcggccacatgttcggctaccgcaacgaagagctggaggcccgctggtaccagctcggcgcgttcagcccgatcaaccgactgcattcgtccaactcgccgttctccggcaaggagccgtggaacttcaaccgtgacgtgagcgccgcgatggtggacgcgctgcgtctgcgccacgcgatgatgccgtacttgtacaccatgaactaccgtgccgccgaagccggccgtccgctggtcgagccgatgtactggcagaacccggatacgccggacgcctacgaggtgccggacgagttccgcttcggcaccgagctcgtggtcgcgccgatcgtctccccggacgatgctgccgcctgccgcggccgcgccgacgcctggctgccgcagggggagtggttcgacttctttgacggccgccgatacgtctcatccgacgccgccggccgccgactggaggtctggcgctcgctcgaccgcacgccggtgttcgccaaggccggcgcgatcgtgccgttgcaggacgtcgcggaatccggcgaagcgatcaactctatcgccaacccgcaggccctgcgcgtgctggtgttccctggtgccgacggctcgttcgtcatgcgcgaggatcgcggcacgtggggcgccaccagcgccgacaccgcgatagcgttcacgtggggcggggccgatgcgtcgcccagcgccttcaccgtcgcgccggttaccggcgatacgtccgccgtacccgagtcgcgcgactggacggtcgtgttccgcggcatcgcgccggtcgatgcagccagcggcgtgcgtgcatggtccggcgaggctccggtcgaggcaacggtggcgtacgacgaggcgaccatgagcctgaccgtgtccgtcaccggcatcagctcggctgccagtctgcgcatcgagattcccggcggtctgcgcatcgccgacaatccggtcgaatcggacgcgatggacctactgctgcacgcccagatgctctaccgcaccaaggagctcgcgctgcaggcggtccacaagctcggcatcggcgcgatcggcgccctgcgcaccatgaaccgtggtccgcgctacgccaacgatttctggatcaccgacatgcccgatgcggtggccggcgcgctcgaagaaattttgctgcgcagctgagcccggttgcagttttctgcaacatccgggtgcgccccggtatgcggcgataagttcggcatggttgccgaagagcgtggcataccgggtgcagtgcgtgggatggccttcgcgattgcactcatcgtgcggtcagtggaaaggaacttttcatgcacaaggtgaaacagcacaagggcgtcgcggtggccgccgcagtctgcgcggtcgcgatggcggcctcgctcgcgacccacgccggcgcggccggggaccggcgttattgactggctggcgttatcgagtgattggcggtatcaattagccggcgttattgatgagccggcgttgtcgattagccagcattatcgaccggcactgaagcatgcagtacccactgcccgcgtttctcccgcacatcccaatccccatgcgcatgcagcacacgctcccgatagtacgcaagcccggaatgccgccccctcaaacgtcgcgtcaccttgacgcggacggtccgtcacatcaatggtgacgcggtcctgagcggcggaaaccagcaccacgtaacgctgcgtcggatcgtcatacctggcgatattgccgaacaattcccgcagaaaatcggcgacaaacactgtgtctgagttattcagcgcatcgatgcccccagcgacaataacgtcgccgacacaccccatgcgctgcaatcgcgcgccgccgctggcaagtctgatgacaaggccgatgtcgcgccccagtcaccccttgcagttttctgtataagtggattttggctccaaacgcaccactccgtcatcgccgtcagtcactcccgcaaaaaacttgagccaaacatactcaactttttgtgttgaaattgggaatagaacttgccaaatggaagttgagtgatgtaggctcaagtttggaaggtccaagagacgacccatcggaacttgggcaaagaacgtaagaacaaacgagtaattaaggagcacacattatggcacgtgcagttggtatcgatctgggaaccacgaattcctgcatcgcaactcttgaaggtggcgagcccaccgttatcgtcaacgctgaaggcgcgcgcaccacgccgtctgtggtggccttctccaagtccggcgagatcctcgtcggcgaagtggccaagcgtcaggccgtgaccaacgttgaccgcactatttcttccgtcaagcgccacatgggctccgactggaccgtcgacatcgacggcaagaagtggaccccgcaggagatttccgcacagattctgatgaagctgaagagggacgctgaggcctaccttggcgagcccgtcaccgacgccgtcatcacctgcccggcatacttcaacgatgcccagcgtcaggccaccaaggacgccggcaagatcgccggcctgaacgtcctgcgtatcatcaacgagccgaccgcagccgctctggcctacggccttgagaagggcaaggaagacgagcgcatcctggtcttcgacctcggcggcggcaccttcgatgtctccctgctggagattggcaaggatgatgacggcttctccaccattcaggttcaggccaccaacggcgacaaccacctcggtggcgatgactgggatcagaagatcatcgattggctggtttccgaagtcaagaacaagtacggcgttgacctgtccaaggacaagattgcgctgcagcgtctgaaggaagccgctgagcaggcgaagaaggagctctcctcctccacctccaccagcatctccatgcagtacctggccatgactcctgacggcaccccggtgcacctggatgagactctgacccgtgcgcacttcgaggaaatgacctccgacctgctgggtcgctgccgcacgccgttcaacaacgtgctgcacgacgccggcatctccgtgagcgacatcgaccacgtggtgctcgtcggtggttccactcgtatgcccgccgtcaaggaactcgtcaaggagctcaccggtggtaaggaagcgaaccagtccgtgaacccggatgaggttgtggctgtcggtgccgccgtgcagtccggcgtcatcaagggcgaccgtaaggacgtcctgcttatcgacgtgaccccgctgtccctcggtatcgagaccaagggtggcatcatgaccaagctcatcgatcgcaacaccgccatcccgaccaagcgctccgaggtcttctccaccgctgaagataaccagccgtccgtgctgattcaggtctaccagggtgagcgtgagttcgctcgcgacaacaagccgctgggcaccttcgagctgaccggcatcgctccggctccgcgtggcgttccgcagatcgaggtcaccttcgacatcgacgccaacggcatcgtgcacgtgtccgctaaggacaagggcaccggcaaggagcagtccatgaccatcaccggtggttccggcctgccgaaggacgagatcgaccgcatggtcaaggaagccgaggctcatgaggctgaggacaagaagcgcaaggaagacgccgagacccgcaaccaggccgaggccttcgcctactccaccgagaagctcgtcaacgacaacaaggacaagctctccgacgacatcgtcaaggaagtcaccgacaaggtcaacgctctgaaggaagccctgaagggtgacgacaccgagaaggtcaagaccgctcagaccgagctgatgaccgccgcccagaagatcggccaggtcctctacgcccagcagggtgccgagggtgctgccgccggtgcggctggcgctgacggtgccggcgcttccgctggctccgcctccggttccgacgacgacaccgtcgaggccgaggtcgtggacgacgatgacgacaaggacaacaagtgatgtccgagttcaacaaggacgactacctgaacgacctgccggatccctcagatgctgaggctgccgctcaggcctcttcaggggctgacgcctccgccgagtccggctctgcgcaggattcggctgcccaggctccttccaatgaaggagccgacgcggctcctgccgcagctgagggagagaagactggcgaaggccagtccgattccgcagacaccctcaccccgctcggcaaggccaagaaggaagccgcagactacctcgaagccctgcaacgcgaacgtgcggagttcatcaactaccgcaatcgcacgcagaaggagcaggagcgcttccgccagcacggcatcatcgacgtgctgaccgcgctgctgcccgccctcgacgatatcgaccgcattcgcgaacacagcgagatggacgactcgttcaaggccgtcgccaccaagattgacaaggccttcgagaagttcggtgtcgagaagttcggcgaaaagggcgaggacttcgaccccaccaagcatgacgcgatcctgcacaagccggacgcggatgccgaaaaggaaacggttgacaccgtggtcgaggccggctaccgcatcggcgatcgcgtaatccgcgccgcccgagtagtagtagcctccccgcaaaactgacatccagctcgctgcaatgagttgatatttaccttggctcccctctctgaggggagccaatcataaagacttttctagaaaggagacatgaatggctgaaaacgaatggctcagcaaagacttctacaaagtccttggtgtctccaaggacgcttcggacgacgacatcaagaaggcgtaccgcaagctcgcccgcaaataccatcctgacgtcaacaagaccaaggaagccgaggagaagttcaaggacatctccgaagcctatgacgtgctgagcaagaaggaagatcgccagaagtacgacgcgattcgtcagttcggcatgggcggtgcccgcttcgccggcggttccggcaccggcggcttcgatgcttccggtttctccgacatctttggttccatgttcggccagggtgccggcggcaatggctcgcgcatccgcttctccacttcgggcggcggccccaacaacatcaacgacatcttctcgatgttcggtggtgctgcaggtcagggcggccagccgtatggcggctacggccaatcgccgtacggcaatgccggcggctatggctatgaggaggccccgcgccccgaaaacggcgaggaccgcaactccaagatcagcctgaccctgcgccaggcggtcaagggcgctaccgtgtccctgtccgtggacggcaagaagttcaaggcccacgtgcctgcgggcgtcaaggacggacagaaaatcaagctggccggcaagggcaagccaggcatcaacggcggcaaggccggtgacctgtacctgcacgtcaccgtcaagcccgatgccacattctcgatgcgcggccatgatatcgtcatggacctgcccgtcaccgtgggccaggccgtggccggtggcaaggtcgaggccaaggatatcgacggcaatcccgtcaccttcaaggtgccggcaggctccagctccggcgcggaagtcaagctcgcgggacttggcgtccagcgcagcaaccagccgggcgatctgatcggccgtgtgcagatcatggtccccgccaagccgggtctggccgtcaagcacgccgccaaagaattcgacgaaaaagccggcgactatctcagcctgtaatcaggaggtgaacaatggcgcggttagccaaccagatgaagcagttgtacgcgatgtgcgcaaccgcgctcgtgatgggcagggccgatctcgacggagccgatgacgtcggcttcgacatcgaactgcccatcttcaccgtcggccagaccgccgagttggccaacattcacccccagaccctccgtcagtacgaccgcctcggtttggttcgtccgcagcgcaccgatggcggcgcacgccgctactgcctgcgcgacattgcccgcctgacccgagctcagcgcctgagccaggatgagggcatcaatctttccggtatcgcgcgcattttggtcctcgaagaagagaatcgccaactgcgccgcgaagtcaaacgcatgcaaaccggcgaccaggagagcgttttcgccgcaggccgtgacggcaatatcgtggaggtacaacgctccaaccgcgcccgcctctggcgcaacgccatccgccgcgaaacccgcgaactgcccggccgcgatactgccgccgatatcgctgccggcgccaccggcgactccaactacactcccgccgactccaagtccatggtcctgtggggttggtgagtctggccgcattgcttcgattccttctccattcgtaaaactgtttgttatctcacatcgggcagctgccgaaaaaaaagcacgaatcttcttgacggagatgtcaaggtttgttacggtgacgtgcgaaaaccgattcgtaaggggtgctttaggctgagacggtatgtgccgaacccttcgaacctgtgagctaacactcgcgtagggaatgcgacggttgaactcctctgttcggctcggcatcccatatgcgcgttgagagagaggaagcgtatgtcaatacgcaaggagctgaccgcccagaacgtactgctgggtttccagcatgtgcttgtttccaacgtctggcttgatccggtgtttgtggccggagcaatcggcttacctattgccctgtcgtcgaacatgattaacgccatcttcatcgtctctggtctggtcactttgattcaggccactcggctggttcgcctgccggtggtgcaggggccgtcagctgcgtttgacgcgttgatgatcgcggcaggtacggccggcatgctgggggcggcgagttcgtccattctcattgcttcgcttgtgttcctgttgctgtgcctgaccggtgtgatagagcggatgcggttcctgttctctccgatgatttcgggcgtggtcatctttatggtcggtgtctcgctgtctggattcacgctgagcgagtttctaggcggggctcccggcgacaagacgttcgccgatccgcacatcctgaccgtgtcgattctgaccacggcgattgtgcttgtcctgtcgttgctcggcaagggcctgctcaagtcgttctcattcctcatcgcgctcgtcgtcggcaccgtggtcgccgcagcatttggcatggtggacttctctcctgtggcatccaagggatggctgggcctgccgaccttcctgccctacggtccgttcacatttgactggaagatcttcatcccgttcttcattgcctacatggttgccgtcatggaagctctcggcgtctatcaggcggcttctgagattcagggcacgcccctcgaacgcaagcaggtgcgctacggtcttgccggcgaggcggccggttcagccatttcctcgctgattggtggattcaccaccaccgcctacccgcaaaatgtcggcctgctcaacctgaccggcgaaggcaagttgcgcacgcgcacgcctgtgatcatcgccgctgtgctgttgctgattctgggcttcgtgccaaaggcgggcgcgttgctgtccgtcattccctcggcagtcgtcggaggcattttcctgccggctgcggccagcctaatcgtgaccggcctgcgcgccctgcgcaaggtcgctgatgacgagcgccgtcaaacggtcatcggcatgtctctgttgctcggcatcgccctgcccaaggcgctctccggcctgaccggcggcgcaagcgtgttctttggcaacaacatcatggtcggtgtattcagcgccatcattctcaatgcgcttttcgtcgctcttccggatttggtggcgaagcatcgtgcgccggcgtccgtggatgttccagcagccgatccggcggatgggactggcgctgcggcgtacgatgaacgataatgctggttgatattggatattgacaggagcgatgcaatgactgatgtgatggatgacgcgcgtcgtatcaagcgcgggattctggattttatccatacctatggctgtgagcaggccccggaagaggcgtttggtgcgttggcgcgcgacgtgttcatctatcagtacacgtatgatctgccgtaccgtcgttactgcacggctaaacgcgtcacccccgcaacgctcaaggattggcgggagattccgccgatgccggtggacgggttcaagcaccttgacctttcgaccataccgaccgagcagtgcaaagccgtattcatgacgagcggaaccacgcatggcggcaagatgcgtgggcgcaacttccaccccgatcttgaggtgtgggatgaatcaatgattgtgccgttccgtcatttcatcatgccggatcgagagcgtatccgcatcgccgtgatttcgccggcatgggacatgaaccagaactcctccctgtcgcgctaccttaccaaggccgtggagtgctgcggcagcgaaggcagcggtgtgttcttcgacgagcatggactcaagttcgatgaaatcatcgccttccttaaccgtgcggtgtctgacggtgaaccggtgatgctgatgggtgtctcgtcgtcctatctgtatctgctcgattacctgcatgagcatgatctgacgttcgcgctggcccccgatagccggttgttcgacactggcggcttcaagagcactaagcgcgacatcaccgaagaccagatgcttgatgagctggaacagacactgggggtgccgcgccaccactgtgtcaacatgtatggcatgaccgagttgagctcgcagatctatgaccaaaatattctgtcgtggtatacggatggcaccagcaactatctcaaggcgaaccccgcctgggtgcgcacggtcttcctcgatccggaaacgctgactcccgtcaaggatggtgagaccggtgtgatagcccattacgaccttgccaattggaattcatgcatcggtattctgaccgaggatctcggccatcggaccccggacggattcctgctgcagggcagggcgaagggagccgaggctcgtgggtgctcaatcgcggtagacgaggtcatcagtgccaaccgttgatgaatccgtgagtcaggccattgatgtcttccacctgccctcgggagcggatgtttcggattacgaaatctatgaggtcgccacatcggatggggtgaagcgtttgcgctatccgcgactggatggcccaaaggtgacttcccttgccaagcagcttgccgatgttcgcaaccgcacgcttgccgcgatgagtgtcaacgatattctcgacatcgtggccgacgcggcccaactatgggacgatccggattttgagctgcggcgtcaggctgaactgttgattcccgcaatcaccggatatgagcctgacatggtgcggattgagctcaaacggtatatgcgccagttcaggcgtcgtgaactgctccggttccttgactccgaaatcggtcagccgtctatgctcgacgaattccggccgaacaaggcggggggatactctaaatatgtgggcccagcgctcacctatcaggtgttctccagcaatgtgccggggattcccgtgtggagcatggcgatgaccctgctggtcaaaggcgcgattcttggcaaatcttcattttccgagccggtgatgcctgcgttctttgctcgcagcattgcgatggtcgattccgacctcgctgatgccattgcggtggttccatggaagggcggctcgcagcagctcgaggattcagccatcgatgtggccgatgccgtgattgtttacggttcttcgcagactaccaaattgattgcgggcaaagtcgccggatccaagccctgtctaggttacggagcaaaagtcgggttggcgttcattggccgagaggctttgcgtcctgatacctatgccgataccgtgcatcgtgtggctgttgacatcgccacatatgaccagcaaagctgcctggctccgcagaccgtgttcgtggagactgatggagccctcacccctcgtgaagtggctcagctgctcggtggcgagcttgagaatcagcagcgcaaatatccgcgctccgtattgagtgacgccgagaacgtggccattcagcgggcgcgcaccgacgctgagatgagagccttgatgggcgggaaggccgcggtgttcgccagtggccatagcacggcatggtcggtgctgtatcgagaacttgacggtagcggtgccgacgaggatgttgcttcgctgatgtcgccgttgaaccgcaccgtcaacgtggtggcggtgccagatttgttggacgctgccagaagactgacttcctgccgtggctggctgcagagctgcggtgtcgctgtggattcaaccagactgtttggtcttgcagatacattggccgaggtcggtgtgaatcgcatctgtccgctcggtgagatggatcgggcgaaatccggctggcatcatgatgggggcttcaacctcatcgatctgttgcgcgcggtggatgtcgaacgcggcagcgacgcgtacagcgattcgttcgatatggatatggaataggcctgtgctgttgcgggcagcagaggctggtagcagggcgaaaggcaagggtaatgacagagcaaagcgatatggtacggcgtccaatggtgaatctggatggcagaacagcgatcatcaccggttccggcaagggcataggagcggctgtggcgaaatgcctggcatcgcacggagccgctgtcgtcatcaattacgtacatgacgccgccagcgcgcagcgcaccgttgaagacatccactcgctgggaggcttggctatagctgtacaggcggatgtttgcgatgaatcgcaatcttccaagctagtgggtaccgctgtcgactcattcggcggcgtggacatcttagtgaataatgctttcggacgcttctcctttgacccgcgtcgccgttccacttttgctggaggcgattgggatgagtttagcgcacagatcgagggatgcctgcatggtgcatatctgatgtgctcacatgtggtgccgctgatgcgagcccagacctccgggcgtatcatcaacatctccagcaatctggtcgattcgcccatcgtgccctaccattcgtatatcactgccaaaggcggcttggtcggcatgacccgctctctggcccaggagctgggcggcttcggcattaccgttaatgccattgccgcaggtttgacggccggaaccgcatccagcgcagccaccaccgaggatgttcgtgaacgaatcattgccatgacgcctcttggacgccttgcccgtcccgatgacatcgccggaggggtcgcgttgttggcgtccgacatggccggcttcattaccggacaatgtctgcacgtcgatggtgggctgaccatgcgctgaggcgcaggggcggtgtgctgacgcgctatggttgtcgcatccgattggtgcaatggaatgcagcaagagtaaaggcgccaattggcgtgcgggcatgcggacggaggtaactatgctgctcaaagccgtgttctgggatttggacggtactctcatcgattctgagccgctctggcatgacggtgagattgagatcgcgcacaacaatggcggcgagtggaacgaggacctcggttgggagtgctccggcactccggtaccacacgtggcagaggtcatgattgcgcatggctgcacattgagcgttcccgaaatcgacaagcagctcaaggattatgtgttcaaggcggaggtcgaacgtctgccgtggattcctggtgtgcaagacgtgctgcattcgctcaaggaagccgacatcccatccatgctggtcactacttcgcctcgccgcatggccgagaacatcatgaagcaggctgatggattgcttgccggctacgtctgcggcgatgatccgtacgagcacaagccgagccctgccccatatctggccgcggctgagagactcggcatcgcgcctgaagacatggtcaagtgcgtggtaatggaagattcctcatccggtctgcgctccggcgccgcctcgggggccacactgattgcgcagactggctggattcgcaccgacacttccggccttggccagtttgcctccatcgactcgtatgagggcatcgatgcggccgcgctggacgcctttgtgcggcagcgtttgggggagtagaaatttcgtttgtattgcggagtttgtgtgggaaaccccagtcgacctgatgttataggccggctggtagggtatttgacggtttgcatataactgtctggttcattgggctggcagctcaatacaagatttaggactcataggaaacacatgggcttcgttaatttcatcatcgaactgctgaaggatccgcgtgccgcgattgccggttggattgccatgggcgtggcaccgaccctcggattcatcttcctcatcgtattcatcgaaacgggcgtggtgttcttcccgttcctgcccggtgattcgctgttgttcgcggccggcgtgttcgcagccccggatgctgcgaccggcaaggccgcgctgccgctgttctggttgctgccggtggtttggtgcgcgccgattatcggcgaccagtgcaactacttcatcggtcatttctttggccgccgtattatccaatccggcaaggtgaaggcgctgactcctgagcgactggccaaaaccgagggcatgattgaaaagtggggcccgctggctgtgttcctgggccgcttcttcccgttcattcgtacgttcatgccgttcatttccggtatttccggtatgcgttggagccgtttcacgccgttctcagtgctcggcggcctgtgctggtccacgttgttcacgctgctgggctacttcttcggcaacattccggccgtgcaggatcacttcgaactggtgatcgtgctgattctgctggtttcgctcgccccgaccatcatcggtctgctcaaggccaagttcggcaagaagaagccggccaaggtgactgatgctcagctggacgtcatggaagacggcatcaagaacctcgataagtaagcaagaaatgtagattaccgcataaggaatcgtcgtgaaaatgaaggccctgactgtgcatatgaggtcagggccttttctgcatgagatgggcgtgaaacagcagcgtggttatccacatttgtcgtggacgacatgccggggtgtggataactcggcaagctagaaccacaatggtcgattcgtgttgagcattgaactcggacacgtttcaatcggcttatgaatagcaacaccacaccccgcgtggcgcgtaggatcacctcgccagcggtagcacctccgggcattccgctgcccacggacgatgcgccgattccagcgcatcgctactacactccgccgcccaggccgttggcctcatgcgaacggcagaaatcgggcgaggctccggcgctcgccctaactacagacaccagcttccataacattgtgacgatgacgtcaggtcatggaggcgtggggctgagtgtcatggcttccatgcttgcatggacattggcgagacgtgaacacagctgcgctctcatagacgctgatttcgtggccggatgccttgacctgctgctcggtgtggaacgagagccgggcttgcgattcagccaagtcgacgcacccctcggccgcatcgagggcgatgcgatgaaccatgagctgatgatgtgggagggtgtgcgagtacttccctatgacccttggagcgcgcgccagcctgactggtgggaagttcaagcggccattcgagccttggcggaaacgaacgacgttgtcatcgtagatgccggtcagggtggactcattgagaccgtacccgatctgcgcagtggcatgcaggtgattgccgcggaattgtcggtgatggggctggccagagccaagtcgcaccggtccagactggattcatggggctgtgaagcgccacatatcgtcggcgtggaaccacgtggcgctccacgtgggagaggccacgtgggtattggtgaggcgcaggactatttgactgccacggtattggggcctgtcaaaccaagtgtcaatctgtgtggagacgtactggaaggcctcggcatcagatcggtgaccaaaggcagccgcaaagccgtgagcttgcttgccgatcttgtcgagcaggccattcgcccggtttcgggagcttcttgcaaggaccggtgatgcggtatggctgccgtaatcactcgggctgatgagcccggcgcagtgcccagaactgtgttcttcggtctattgaatgatgtggcatccgacccgcaggttaccgatctggcggtgacctgtaatggccgcgtttgggcggaccgcggcaacggcatgcgagaaacagtattgcgtgtgccgtttcgctcgccgcaagtagttcgagaatacgccgtccaactgtgcgcgcagcttgggcgcagactggatgatgcctgcccgatagcggacgccgccagtccagacggcatccgcgtgcatgcggtgattgccccattggtgccacaaggtgccgcaatctccatacggttccctgacaggaccatggcatcgttgcgacatctgagccaattaggtgtattcccggctgcttggctgccgatgttcgtgggactggtgcgcagacatgccacagtgctgattaccggcggaacaggcgtgggcaagaccaccttgctcaaggcgctgctggcgcaatgcgatgtgaacgagcgcatcgtcaccgtagaggaagttcgtgaactgggagaactggggcgtggcgatcatgtgtcgttggtaacgcgcgaggcgaatgtggagggcgtcggagccataagtctgacggacttggtcaaagcgacgttgcgaatgcgccccgaccgcgtggtgctgggcgaatgccgtggcgcggaaatcgtcgacctattgcgcgcgttcaattctggtcatcacggtggcatgaccactgtgcatgcggacggcgtgaaccgagtaccgtccaggctgatttcgcttggattactcgccggagtcagtccacaggcgttggccatgctggcggcaggcgctttcgacgcggtggtgcatttggagcgagtgaacggacagcggcgtatcacgcagatcggcgaactgcgtgtagcacatggtgaactggcaggaacaccgctggcggtatggaatggctgccatcctcctcggtatgccgccgaatgggggcacttcattgaacgatggggcatcgttcccgggccgagtggtggtgggtgatgatgtggtgtgctgttctggtggcgctcgccgtgctgatatggccggggaacaagtccgggaggctgtatcggctggcttaccgcgggcgtgcggtcgattccgcagccataaacgaacctcgatatgccggctcacctcgcgtgggcgttgcgcaggtgattacgtccgccatcgcgcgattgcgaggtggcggcacattggttgaagcattcgaggaacaatccagcagacgcttcgccactcagcgcattactgtggaacggctcataacggtgttcgaacagcggcgtctgcccgacgaatcaccagcgcaggtacttgaagctgcacgcggggtcaccgccgcagcggttttgagcgatgagctcggttgccaagcagtgccatgtctggaagcggtattgactgcttaccggcagatgaggctgatgcagaacctgcgatcgcaagcatgtgccgttcctaaagccactgtggggctgctgagcgcgcttccggccgtcactgtggcattgggcgagcttctgggagctagaccattggcgttcttgcttggatcgccacgcggtgtggtctgcttggtattagggggatgttgttatgctgccggcttggcatggatgcgggcattgttgaaaggcagcggattatgagtacggtgtgggtacacgccgcggcaggctgtgcggcgatcgctagttggctgtataaggctccgtctcgtcatgacagccgcttgccgggcgaggaaccggccgtagcgcatgattgcgggtcgtcatggaccatactcatattgcgtatgttgcaggtgtccttgcgtcagggctcctcgattccccgggcgcttgacatggtgggcaaagccgtcggcggcgactgcggcgctcgcatgagcgaggtcgggagctccctggccagaggggttccctgggctgatgcgtggcatgccgctatggctgttcagcatgagggtgcgccagctgatagttcatccggaaaacgtaccagcagaacgcaacgagatcttggcctgctgcaatcggctttggaatcgtcatggacgcatggcgatatgcctggcgtgcgcctcgaatccgccattgaacagctggaccgtgacgagcgtgccgccatcgaacggaatgccgcgaagctgtcggtaaagctactgatgcctacagggctatgttttctgccggcattcgtgctggtaggagtcattccggcgattgcgtccttcatgatgtgaatataggcgtgaactgagtgcgcttagggtgaatcttgttgtattgctcggtattgcacttggctgcgtttggttatccacattggtggtggacgacacgtcggggtgtggataactcggcaagctagaaccacataccccgtttttcctggtgcatgaagcgttgatagtccacagtggtatgcaccccgcgtcaacccggcgcgggggccaaccactcacacacgcatggggaaggtgcgaagccactgcgcagcttcccctccttaccgaaaggaacgccaatgaatacccctatccccgtcatcgtcgacgggcaggccggcatctttgcgcacagcaaggctcgtgtggccacgctgaacgccaaggcgaaagaacggctatgcctcatggacgcacgcatccgcaccctcatggctgagcccgaagaaggcgcggccactgcggaatacgcagtcgtactcgttgcggctacaggctttgcggcggtgctggtcgccatcctgaagtcggatgccatcaagacgttgctgaccaacatcatcaaacaggctctgaaagtcgggtgacagccatgaagaccatgacatgccggtggcggctcgccagactgccgccagacctatgcacggggtcggccaccgccgaattcgcgatcgtattgcccagcgttatcgccatcgccgggctgatattggcaataggacgtgtggtcatcgtttccatggactgtcaaagtgccgcggcagcggctgcacgcgagtttgtggttaccggtgacgaatcatcctcgcgcagcatagctgcggacgttgccgggggagagcctcgcgtcatcattgcccacgacggccaatcgacgagtgtgatggtcgaatgttcggtattgcctggtccgctggatgtcactccaacgcgggttaccggcaacgctacggcgataagccaataactggtcggctggctgggcggccgcaacagaaaggaactgcggtgcagggaatgcgttatgaggagggatcgggcacgatggccggagccatgctggttatggtggtgggcattgcgctcgcggtggcggcaagtgtgggcaacctcatgatctgccagaaccgagcgcgttccctcgccgaccttatcgcctttgacgccgcgtatgcgctgtggcatgcggatatcggtgatccatgtgcgctcgccgccaacatggctgaagcgaatggtgtagttttgggctcctgctccgtgcgggatgaagacgtgttggtaaccatcaaggtggaaaccatggtcctggtggcatcatccgtggagcggatggctcgggccggaccggtgagttgtacggaaggagacaattatcacaataatggaccgtaaagcaccgatactctggcgggcttctgggcctttggctaaggtgagagcatgagcgagagtgaacgcaacgagcgccgtcgcgtggtggccatggtgggcaaccccacttccgataaaggccgtggcgctaaggtggacgcgcaggtattgggtctgctggaggaagccggccgtgcccataacttcgacgtcatcgacatcaccggcacgagtttcgacgattccctgaaccaggcgcgtgaacgcgcgcacgagtacgactatctcgtagtggtcggtggcgacggcatgatcgcacttggagcgaacgccgtgggctgcagtggcaagccgttgggcatcgtggccacggggtcgggcaacgatttcgcacgaggactgaagctgccggtcaaccgtatcgaaaccgcagtggaaggtatcgtcggtgctatcgtgcgcggatcacacatcgatgtggacatgggacgcgtgacctctttggacggcggctatgccgtggatccctccactggcgaggagtacgagtaccaggagagcaagtccgccgagcatccgattgaccggtactatgcgggcatgctgtcctgtggtcttgacgcgagcatcaacgaccgtgcgaatcattcgcatctgccgaccggcaccatgcgctactttgcggcggtgctggtggagctgacgcatataaagcgttatggttaccacatcaaagccacattggcggacggtaccacggatgaacgagacatcatcacaccattgctgacgattgcgaattcgaggcatatcggtggcggcattgaggtctcgccgtactcctgcttctccgatggattgttggacctggtgtggatggaccacgtgccgaacttcggcgaatgcgcggtggccatttcgaatgcctataacggcaagctacttgcttcaaaggtgttcggctggaaacgtatccgtgaaatcgaagtcacgcgggcagcggaaggcgacgagccaccggtgctgatggcggacggcgaatatatcgggcatttgccatttagggtagtggccgaggactgcgcgttgcgcgtgctagtgccgccggccgtagccgcccgtgaggtggattcccgacaggaagtgctcgacgtcattgcccgagatggtcgcgatcccgtgaccggccagttcgcgtgacccgattatattggctcccctcattaggctgagccgtaaagcaaacagcccagtgggctgtttgtaggcgagggttcgacgatagtcgaaccagaagaaagtcagccgtaggctgtccgcaattgcggacgagctggccgcgaagcggactgaggggagtgcgggagagcggtaccagagccaatgcccgtcagacctcagacgacatagctttcgatatgcagcgtctgcgccatgacctctttgatggttcggtcgctgatgttcggatgcgagcgaatcagtgagataagccccacaatcagtgtgaagaacgtctcatggacgttggtgattggcaggccatgcatctgctcgaaatcacgtacggtggtctgggcaatgtagtcggcaatacggtccgccgcgcggtcaatgaacttgatatacagttcggcgttgccgtcttggatcatacggtttgagaaggggctctcgtcggcgatcagggagcggagtacatgcacgatgtcgtctaatgccttgttcacgttgcctgtttcgcgcgcttggttccactgcttcaacgtggtgaggatttcgtcgatgacgttatcgagtactgcgtcagctacggcttccttgtcttcgaagtagtggtagaacagcgaacgcgtcataccgacttcgcttgcgatgtcggaaacggtgattttggagaagcctttttccagacacaccttgcgcgcggcttgcacgatggcgtcgcgccgggcatcgccgcgggtggggcgtttctcgtcgaggatatcgctcatgggtgcctcctgaccacaaccgttattgacactatgttaatacaaagaaagcggttaataacaataaaaatgcggtaaccgttgtcaggtgaatgtcgttggaatataaagagttttcccgattcggcaactatgagcccggtttatcttgactttttatcggttaattctgagggcaaaggtaggttagtagctatggcacttgcactgtatcgtcgctatcgtccggacaccttcgaaggggtcatcggccaggaccaagtcacggtcccgctgatgcgcgccttggacgagggcaagctcacacatgcctatctgttctcagggccgcgaggctgcggcaaaaccagctccgcgcgtatcctggcccgttgcgtcaactgtgccaaagggccgacttcccacccctgcggcgaatgcgaaagctgcaaggacctggccaccggcggtccgggttccatcgacgtggtcgaaatcgatgcggcctcgcacaacggtgtggatgatgctcgagaattgcgagaacgcgctggtttcgcccctgcgcgcgaccgctataagattttcattctcgatgaggcccacatggtcacgcagcagggcttcaatgcgctgcttaaaatcgttgaagagccgcctgaacatgtgatgttcatcttcgccaccaccgaaccagacaaggtgatcggcaccatccgttcgcgcacccaccactatccgttccgtctggtgccgcaggaagtcatgggtccctacctggagacgatctgcgacaaggaaggcatcaagcccgagcccggtgtgctgaaactggcgatgcgcgccggtggcggctccatgcgagataccctgtccgtgcttgaccagctgatggttggttcggtcgaaggcgttatcacccatgatgccgctgtagccctgctcggcttcacgccggaggcactgatcggtgaggccgtggatgcggtaatcgatcacaacggcgaagccctgtacggcgttatccagaaagtcgtggtcggcggattcgatccgagacgattcgtcgaagacctactggctcgtgtgcgtgatctgctggtgcttacgttggccggggaccgtgcggaatccgtgctgtccgacacggctgaggccgaggatatggacgatctgcaccgccaagccaaggcgctgggactgggcgcactgaccgcaatggcagacatcatcaacactacgttgggtgccatgaccggagccatttctccgcgtatgcgcttggaactgctggccgcgcgattgttggccggcagtgaatcaggctttgcaacagccgctcccgcgccagcttcttctggtatgccgcctgcggctgcttcttcgacttcgactacgtcagccgcttccggtacgggtgccagtggttttgccggcgcatcgcgaggcgggtttgccggagcctcacatggcggattctccggtgctgcacgcaaccagcaagcagccgcgcctcagagcaccgcttcccatgaatctgttggaggcaatggccctgtcaacggcccggtcagcgaccgacccgcgggctctctgtctgtgcaacctgctgtagcaactgctgctgccggtgccgctcctgccgccaatgccgggtggggcgctcccgccgcgtcgccggccgtcccggctcaaccggtgacctcgcctgcggcatcggataatcggtccatcgacgagaagtgggatgcagccgtcgccgctttgccggaaaccattcgtgaatatgtgtcacgagacaaggtgccgaccgtaaaattcggtcccaaccgtaagggtctgccttgcctgtcgatgacgttcgacaagtcgctgagccagcacgctttcgccttggccgtggataacagcggtaagaaggcggcggtcgtggtgatggatgccgtgcgcaacgagttcggtgccaatgcggttattgcaccttctgcggtcgcggcgaatggcgagcgagtcgaatccgtcaaacgtatgagcccggagcaattggccaaggtcaagcagcagattgccatggccaaggctggattggccgcgtcgagtttgggcgcgggcctgggcattcatatggggagcgagccgaaagctccgaagccgactgcaacaggccgagccgaggatacggacgacagccatcgagccggccaatccagtgcatccacggcggcgaagaactggagtgacgatgacccttgggccaagccggccgtaagcaacgcttcgccgcaatctgcagacgggttcgcacctaacgagcccgttgctacgcctgcgcctgaagagcatcacaagaagcatgttgcggttccggacatcagtgacggtgttgatccgtgggccgctccggctgctcctgttgcacccactgcgtccgttgcgtccgctggacccactggacagtccactgggcagccagccgccgcatcttctgctacggcagttgccggcgagagcgacgatccatggaatcagacgcagtctcaggccgcggtctcaccggcgtcgcaaccggccgaagccgacccgtggaaccagccatatcagcagtctcctcacgatgatccgtggaatcagccgcaggggaaccatgctcaggcggctccacagccaggagacgacccgtggaatcagcctcagccccagactccggcttcttcggttcctcagacagtgtcgggcaatatgtcgggcaatgacccgtggaaccagccccaatcggttccgcagccggctgccggcgatgacccgtggaatcagccacaacccgctcagtcttcatcatcagcggttccggctgatgatccgtggaatcaaccgcaggcagttccacaatcggctccgcaggccaccccgcacggtgatccgtggaatcaaccgcaacccgcacagccgaccccgaatgccgatccgtggaatagccggccccagccccagccgaaaccacaaccgcaagtcgcggccgaggatgacgaatactcgatgagcgaccagtcgctcggcgaggcgacggccatgaatctcgacgatctgaaaaagctattcgaggtcaaaaaagtcgagcaattcgcggcagatgatccgaagaaccccaagaacatccagcctgccaagaagcactcggatgaataatgaggacgaataacgaggaatacccatggcacttgcttatgacggcgcaatacagcgactgatcgacgctttcgggcggctgcccggcatcgggccgaagggcgcgcagcgtatcgccttctacatgctgtccgcgcccgaagatgaagcgcgcgatttggccgaggccatcgaagaggtcaaggccaagatccgcttctgtgatatttgcggcaacgtgtgcgaatccagcccctgcccggtatgcgccgacccgagacgcgaccgttcggtgatctgcgtggtcgaagagcccaaggatgtgatgagcatcgagcgcacgcgcgaataccacggcctataccatgtgctcggcggcgcaatcaacccaatggccaacgttggccctgccgacctgcgtattcccggtctgctcaaacgcttagaaggcgatgaggtcaaggaagtgattatggcgctcgacccgaatattgaaggcgaggccaccaccagctacttgacccagctattgcgacccgtaggtgtcaaggtcacccgacttgccagtggcctgccggtgggctccgacttggagtatgccgacgaaatcacgctgggcagggcactggccggtcggcgcgaggcctaagccagcgtatcattggcgctctcgcccttgcggcgcatccacggccagaatgcgccgtggcggatgatgcgcgcggccttgtgccgtcgcgccaaccagatgatgaacagtcctgccgccagtatgcctagaccaacaccaagggcgatattgcgcgcgtcaagcacgtcattcggctcgggggccggcatcggaatcgccacgcggtgcccggagataagcagtcggtgcgtgttcacgccgtatggcgtacaggtcatcaaagtgacgcgatcctcacccggcacgatcttgagcttcgacgtgtcatccggcaaaatcaccgaaatgcggtccactttgtagcccaaagtttcgcccatgacttcgatgtagaagaagtcgccctctttcacctcgtccaaacgggtgaacatcagcgcttcaaccaacccgcggtgcccggtaatgaccgaatgggtggatttacctcccactggcagcgacgtgccgtacaaatggccggcaccagaagccagtgcttcctcggaagtgccgtgataaaacggcagattgatggactgcttgggcaccttgattgtgcccatcacgccgttgccggtattaagcagtgactggtattccttgtctttctttgaggcggaatcctcgccgctggcttgggatcccccttgagcggcggcgaacggatcgacggcttcacccaagataggctggccggattcagcgagcttcttgttgtatgcgcgggccgccgtgagcttgtcttccgcctgcgggtaaggccagccagctacttctttggccgtggtggctgtggtggcggccaagttgcggtcggactcgaattgcaacgctagcgggaagcaggccacggcgattgcggcgatcagcaacacaatggtgatgatgcgcatcgcccacagattgcgctgcaggcgtcggcgctcggccacgagatcgctgatatcgatgacttcgtcaaatggagttggaacgaatgctgtgggctcggggcgcgctgaggaaacgttgtcatttgcagatgtgtcatccggcatgaccgcgttgttttcccgcattttctgtgaggcacgcttactcgtcgaacgtcgatgcagcaatgccatagtcgcctgttcctccgtttgatctgctcatgatttgcttatacaagacggccgggtctgtcttagtcgtgcgtggcataggtgctgtcgcaaatggcaacaccgcacgcgccacactgcgaaacgttactccgtgccaagcctttcatgcaacatgccgacggggccgtatgggggcaatataggggggcataagaagtctgaaaatgcgatacgaacaacgttgctacggccgtcagtgatgtggcttacttcggacaagccgttgagatgcaaggggctgcaaaggattgcaaagtatggcaacatgataagtcgcggcgtcggcaatatttggcagagctttcaaataggggggtatgaatgcataaagagggaatatgttaccccgataaaaagaggcgctattgctgttttcgtggatgtcggttcgtcgtcgagccgttggtttcgtaggcgtgaggggcgttcccgcgtattctgttttccgaccaaagaaatgaatcgcgaagaacgcctgagcaaaagctcattcaccagattgccgaacgtcaaaggcacggttgcagaggatgcgcggatcacgggttcgccgctgcgttccgaattggctagtgtgctcagagaaaagatggcactgtctgggcatctctctttttaggtcaaggaaaagggtctggcgataggcggtgatgacgcccatcgtgttggtggcactgttgctgcaaaaaggaaaagtctagttcgtaatctagtgtccaacttccctaataggaatggtccaacttccgcaacgaaaatggtccaacttccctaataggaatggtccaacttccgcaacgaaaatggtccaacttccacaattagaatggtccaacttccgcaatagagtgatttataggttgatgtttcgacggtttgcgggagggcacatatggcaggggagagctcggagattcaacgtggcgagtaccttcctcgagtggctgatgggttgctgactcgggcattgcagtcttctggtgccgttcagattaaaggtccaaaatggtgtggcaagactgcaacggcagaaaggcagtcggcgagtcaggtcttcatgcaggacccggatcgcagtgctacgctgttggccttggctgatacaaagccttctctcatcctgcgaggtgaggagccgagactcattgatgaatggcagatggccccgcaattgtgggacgcggtgcgtttcgccattgatcgagggcgcggtcgtggccgattcatcctaactggatcggcgactcctcaacaggaaccagctcattccggagtgggaagaattgcccgattaaccatgcgtaccatgtccttatttgaatcgcaggaatcgacgggcgttgtttcgttgggagagttgttcgatggcaaccatgatgtttcgggtttctccgatttcgatattgaaaacaccgcgtttgcgctatgccgcggtggctggcctgaagcagtagtcgaatctcgagtaaatgttgccttgcgcatggccgcggattatgtcgaagaactacttgattctgacatcaatcgtatggatggtataaagcgcaataaaacttggatgcgtctgattatgcgctcgtatgcgcgcaatatttcttctcaggcgtcgcaatccactatcgcggcggatatgcagggtgaaccgccttcggaaggtacactctccgattatttagatgcattgtcgcgagcttgcgtaactgaagatcttccagcttggaaccctcgtttacgttctaagactgcagtgagaacgagcccaaccagacacttcagcgacccgtcgatagcttgtgcggtactgcacgcgaccccggagaaactccttaatgatttcgagacctttggcttgctgtttgagtccatgtgtattcgcgatctgcgtgtgtatgctgatgcgcttggcggagatgtgttccattatcgggataagacgggattggaatctgatgcggtcattggcctgcatgatggacgatgggctctcattgaggtcaagctcggagaaaagcaggttgatattgcggcggcccatttgaaaaagttggctgacagaattgatcaagatcacgaaggccgtccgtcattcttgatggtgctgaccgctacggctgccgcttatcgccgggatgatggggtattggtagtgccgttggccacgcttgctccgtgagctcgtatcgtgcgtttgacccatcgttcccaacacaaaaggaaaaggcccgggctgcgggaccgggccttgaaaaggagagaggaagaagaaggtattcagttatggggtctgcggaaacctcgccggtttgctttcgtttgccggtaattgatagttaaccgctcgaatctcaaaggatggatgcggctgcctcaaagaaccaccggtgaaaacttgaatatttgctgaacaacgtaggccatgcccgtgtccacatgtcggcgcggggtcgcggggtgaacgcggcaacctttataatcgttgcgtttgcgtagaatattgagcaaactccccctaagagaagaacaaaggacagcagtggctctcatcgtgcagaagtacggcggttcgtcggtcgccgataccgaatcgatcaaacgtgtggccaggcgcgttgttgagacggaaaagaagggcaacaaggtggccgtggtggtctccgccatgggcgacaccaccgatgaccttatcgatcaggcgctgagcatcgactccaacccgcccgagcgcgagatggacatgctgatgaccgcaggcgagcgaatttccatgagcctgctggccatggccattcacgccgaaggcagccgtgcccactccttcaccggtcagcaggccggcttcttcaccgacgcccgttacggcgcggcccacatcaaggccgtgagaccggaccgcgtgaagaacgcgctctcattgggagacatcgccatcgttgccggcttccagggcatcaacgccaagggtgacgccaccacgctcggccgcggtggttcggatacctccgcagtggcgcttgccgtggcgctcggtgccgatatctgcgagatctacactgacgtggacggcatcttcaccgccgacccgcgtatcgtgccttccgcccgccgcattccgtccatcgattatgagtccattctggagatggcctcctgcggctccaaggtgctggcactgcgctgtgtggagtacgctcagcgtttcaacatgccgctgcacgtgcgttcctcgttctcccgtcgccccggcacattggtggtgcccgacggcattgacccgcgtacgctgccgaacctcgactgagcgcggctacggcgaacgataatcgtaagtaatttcaagcaagacaaggcaagacatgactgaagaagaagcgaaatccatgggcgacctgttccctgacctgggccccgaggcaccggtgatttccggcattgcccacgatcgttccgaggcgttggccaccgtgcgtggcgtgccgaacgagccgggtatggccgccaaggtgttcaccgagctggccaccgccggcgtgaacgtggacatgatcgtgcaggccggcgcatccgtcggcactgcggacatctccttcaccgtgcccgaatcggccgtcaagcaggttcagaacacactgctcgacaagcaggaagtgctgggctaccactccttcgatgtggacaccaacgtgggcaaggtggccgtggtgggcgttggcatgaagacccatgccggtctggccgccaagttcttccaggccctgagcgatgagggcatcaacgtgctgatgatttctacctccgagattcgtatcgccgcgctcgtgccgctcgatcagctcaacgacgccgtcaaggcgctgcacaccgcatacggtctcgatgccgatcaaatcgaagccgtggtgtacggcggtactggccgctgagccactgagccgcgtttttgcggtatatacgacgaaagccctcctcacggagggctttctcagtttcggactcagtttcaactacttcttggtgatgtagccgagagccttgagcatttcggcgcattcaagggcaccgccggctgcaccacgcagggtgttgtgggccagacccacgaacttccaatcgaagatggaatcctcacgcagacggccgatggaaacgcccatgccaccctcgtagtccacgtcgagcttgacctgcgggcggtcatcctcggtgaggtactggatgaagtgcttcggtgcgtgcggcagttccagctcggaagccttggacgtgtagttcaccagacggtcgatgagctcttccttggtggccttcttgccgaagttcaggaacacggtggcggtgtggccgttgagcacgggcacgcggatgcactgggaagtgatcttgaggtcgccgtcgaacggcacgatctcgcccttctcggcgtccacatgaccgaacaccttgagcggttccttctcggactttgcttcctcaccggagatgaacgggatgatgttgcccaccatctcgggccagtccttgaaggtcttgcccgcgccggaaatcgcctggtaggtgctcacaaccacctcgcgcggctcgaattccttccacgcggccagcgccggcgtgtaggcctgaatcgagcagttcggcttgacggcgataaaaccacgagtggtgcccaggcgcttgcgctggtgctcgatcacctcgaagtgctccgggttgatctccggcaccaccatcggcacgtccggggtccagcggtgggcgctgttgttggagaccaccggggtctcggtcttggcataacgctcttcaatggcgcgaatctggtccttcggcatgtttaccgcagagaacatgaaatcaacgccagaggccacggactcggcatcgtcgccatcgacgaccaccatgttcttgacatattcgggcatcggggtttccatcttccaacggtcgccgacagcctcggcatacgtcttgccggcgctgtgcgcggaagcggcaagcgtgaccacctcgaaccacgggtgattctcaagcagcgtgataaaacgctgaccgaccataccggtggcaccaaggatgccgaccttcaatttttcggacatgatgacctctatgacctctgggtttcgatggattacttacgtcggacggccgtcatgcgggtggccgtaaaacaatgcaattgtacgaaacacgcggaacaacggcagtggtcttcccagatggtggctgcccaatgaagcgaaggcgatgttctacactggtagccatgtctatcgcatcagtagaggcccaaaaacagctcgaccgtatcgtggctctcggctacccggatgtggcggatatttccgccgccgcattccgctcgctggcccgacctctgatcggggcgctcgagcattccgatttgggatcgaacatcctgctggtgcccacgcgcgaactggtttcacctgagtcactgatcgcacgaacctccatcaatcgcatggccggcttcaccaccatgccgccgcgtgacatcgccagcttcctgcctcaagacggcttcatgccgccggaaggcccgttctatctggtcgtcaatccgcacaccggcacgtgctatgtcaatcgcgagccggatgtggcccgcaaacttattgactccgatgagcgcctgccgctcaccctcgaggaaggcttggccatcgccacccagcacccggagtggctgctggaaaagaacggcttcaatctgctcggctcacgctccgcagacggacgcgtgccgagcatctggatgagccagaacgcaccgcgactgggagccgtctggcccaattcccgccatacttggctgggcaacgcgtattgcacggcccgtcgcggggtgagtctgttccgttaaagcgattctcctcaaaagacaaggtcggcaaggtggatggcgaccgcccgttgtcggcgcatggggaaccgtaatgaaagtcaataaggatggcaccttctccggctcctaccacgactcggatatgggagccacgggagacggctatctcataggaaacgacgtcgatacgctgaacggcaaagcattgctcaacgtgacgagcggagcggataagggatacacgttctacgatttctcgtagtgattcagctgccgtgcggagcggcggggaacgtgaaggaccggcgcgtatgctgtgcgaaacagcattacgtccctagactggtgaggcatgacgaacctgcgattccgcgaagacggcagcttccgcgtgctgcagatggccgacatccaagacggccccaacgtgctccccgatactatccgtcttatccgtgaggccattcgcaaagccgacccggatctggtggtgttcaccggcgaccagattcgcggttacgatcctgcctacatcgacactttcctgcgccgccgtggcgaggaaccgggcgctcgcgtgcgtgcggtcaccgaagtcgaggccaagctgcgcggaatcaagcggcgggccagagaccgcgtgaacaatcgtctgctggccatgaagtctgacggcagcaatcccgacgtccaacaaaccgcgtccaccgcgtccaccacgtccacgctggtctactccacaacatccgattcacaggatgtgccgacgactttggacgagctcatggacgagacccgtgacaaagtccgccgcacgtttgccggcttccttggcccggtcatcgaagcggaagtgccgttcgccgccacctacggcaatcacgatttccagtgcggcatcctggccgacgagcaggacggcatctaccgcgaattccccggctgcctgaacccggtcgacagcctcgagccaggcacttttgccctgcccattgaggcttccgacggatccgggcgcgtagctatgtccgtcatgatggtgaattccggcgattacgccggcaagcctgaagagaacgacgcccaatacccggcctatgtggtcaatccgcgcggtcttgatttggctgattccgatgggtatggcacgccaagccccgaggcgatcgattggctgggagccgtacagtccgaacttggcgaacgcaacggcgacggtaagccggtgcctgccatcgccttccagcacattccgccgcaggaattctacgattgcctcaaagaggttcccgcatggacgccgaacgcggtggaaggcgcgcgtacccacgccggccattgctacgtgctcaaccatgagatttgccggccgggatcgcggctgggtgaggcgattggctgtgcggacgagaacgtcggtgaagtggacgccttgcgtgaggcaggcggctacttcgcgctgttctgcggtcacgatcacaagaacgccttcgtgggccacgcgcatggcattgatttgggctacgcgcctacctgcggattcgaatgctatggtcccaagtcgcgctatcgcggcatccgcctgtttgaattccatgaaagcaacccggccggctatgtgacccgcatgctcacctggggtgatctggtgggccgatactccagcaacgaggtgcgcgtctggttcgaggaccactgcgtgaccggtgccatcagcatgcgtaacgaattgcgccgcccgcaggtattcgcagtgctggccggtgccatgagcctcggttttatggccgtcatccgctcgttggtgaagaagcggtgacgaccataaaaccggtcaatacatcaattctgctgatacgacctgaatgcggaatcccagggctatgcccctgagggtctcgagccttccgttgatggcctcggtgggcccgttcgcgctgtgctcccagtcgaagaacgcgaggacgtcgcctatgcgcccccacgcatagctgtaagtagtagtgctgcgtcggaacgctaggtgtgctggcgtattgtgagatgaacgggatgttggaatgggccgtcgctaggatagaggaagttatgcatgttaccaatgcgtaaacgaatatccaataagcgattgtatgaatggttcacacagtaaaggaggaacaatgggtcaggatcaatcatccgtttttgatctcgcagcggtagccgcagcgtccaatggggggaacaacgacccgctgctgcctccggcgcgatttatcggcgatccgcagaagccgagtcgtatgccgtacaacaagtacgccgcctacgacaagcagatcccgtttgattacccggagcgtacgtggccgggcaagcgactgcagcgcgcgccgcgctggtgctccgtcgatcttcgcgacggcaatcaggccctcgtcaacccgatggattccgagcgtaagctgcgtttctggaacctgctcgtctccatgggattcaaggagatcgaggtgggcttcccgtccgcttccgagaccgatttcgacttcatccgtatgctcatcgagcgtgagctgattccggacgacgtgaccatcgtggtactcacccagtgccgcgagcacctcatccgccgcacttacgaggcgctcaagggtgccaagcgcgccatcgtgcacttctacaactccgtgtctgtgttgcagcgcgaggtcgtgttccgcaagaacaaggaagagatcaagaagctcgccaccgacgccgccgaactgtgcaaggacctcgagaacgaggccaagggcatcgacctgtactacgagtactcgccggaatccttcaccggcaccgagccggagtacgccgtcgaggtgtgcaacgccgtgatcggtgttatcaagccgactcccgagcacccgatgatcatcaacctgcccgccaccgtggaaatgaccacgccgaacgtgttcgccgacgaagtggagtacgtctccacccacctcgacgaccgtgactccgtggtgctctccctccacccgcacaacgacgaaggcatgggcgtggccgccaccgagctggccgtgctggccggcgccgaccgcgtggaaggctgcctgctgggcaacggcgagcgtaccggcaacgtcgacttggtcacgctgggcctcaactggctcacccaaggcatcgacccgcagcttgacctgtccaacgtgcccgagattcgcaagacggttgagtactgcaaccagatcaagatttccgagcgtcacccgtacgccggcaacttcgtgttcactgcgttctccggctcgcatcaggacgccatcaagaagggtctcgaggctcgtcaggtggccgccgagcgtgctggcgccgatctcgacagcttcgtgtggcttgtgccgtacctgccgatcgacccgaaggacatcggccgcacgtacgaagccatcattcgcgtcaactcgcagtccggcaagggcggcatggcctacctgctcaagaccaaccacaatcttgacctgcccaagcgtctgcagatcgaattcgacaagatcgtgcagaactacgctgacacgaccaagaaggaagtcaaggacgaggatatctggcgtctgttcaaggacgagtacctgccggtcgaacagtccggcatgaccgccgccggtgtggttgtgggcgatactcatgacgcctcgctcgtgccgtggggccgcttgaagctgctcaaggtggccgtcagctccggtgaggatggctccgacaccgtgctcaaggctcgtctgctcgaccgcggcgtgaacgtcggggtcgatgcgcccgtggagcgcgaggtctccggcatcggcaacggtccgatcgccgctttcctcaacgccatttccaactttggcgttgacgcctcgattatggattacgcggagcacaccatgtccgtcggcaccgacgccatggccgcctcgtacgtggaatgccaggtcggcgaggccgatgacgcgcagatcgtgtggggcgtcggcatcgattcgtcgattaccaccagcgccctgaagtcgattatctccgccatcaaccgttcccagcgcaagcgctgagcgctaacagaacaaaaacaaggctccctctgattgcatcagggggagccttgttgtctgtgttttacttactactgagtgacgccgttggtgccggtgttcccgccggtgcctccggaattaccattatcgttgccggtattgttcccgttgtcaccgccggtattgttgccggcgttgccatctccgccggtagtggtgccgggataattcgggcactcggtggaatagctcggattggcgaggcactgctgggcgaactcctgagcctgctgttgcttcttggcttcctcttcggccgccttctgctgtgcgtcctgctcagcctgcttctgcgcgtcttcggtggactgcttgttggtgttgttggacaggccgttgctctgtcccttgcccaagccccaagtgccgtcggagccgccgatcttgccgttgtctttagcggtcgggaactgctccacctcggtgccttgcaaggcctgagccatgaactcctggaacaggtgggcggggtatccagtggaagagacgccgtatccggagaaggctggcaccacttgcggattgcccttatcgtccggattccagatagcccacacattcatcatgctgggggtgtatcccacgaacgacgaagccatttcgtcgttggcggtaccggacttgccggcgacgggtcggcccaacatgctggatgtgccggccgccgtaccgtacgtggtggtgccctgcatggccttctgtaccaaagcgcagtcgttggcatcgaacaccttggtgccgttgctgggcgcgttgtacatgtccttattgttggaatcaagcactttggacaccatgtgcaaggtgttcttcacgccattgttggcgatggtcgaatggccttgcgccaaatcccacacggtcagggcgttgatgcccagcacgttgtacatggagttttcatcgatatcgccctgaatgcccgcttcatgggcgattgcggccgtgcgcttcggcgtcagatgctcattgacgttcatgaacaccgtgttcaccgagttggcggtggcctgatacagattgatgttgccccagttgttctccagagcgttgttcacctcttgatccaagccggtgaagtgctggtgggaattgccgttgaacaatgtatcgaagctgacgccggattgcgcggcccccagcaaagcgaacggcttcatagtcgaacccggttcgaatacggcctgatcggcattgttgagctgcttggacagataatctgaaccggcgtatacggacaatacttcaccggtcttcgggtccagcgctatgccgccgatttgcagggattcaggcatgtcgtccagacgggtgtcgccgatggactgcataagatcctgcttgctcttgtcgatggtggtgatgatcttgtatccgccagtatccaaatcctctttggtaaaggccttggactgcaccagctcgcggcgcaccatatccagcagataaccgttcggccccgcgtattcgttctgctgcgccaccgcggcggtctgcgggaacttggcatcagtgtgctgcttggcagtgatgtaaccatcctcctgcatgatgttcagcacacgcttgaagcgcgatttggccatatcggcgttatcggccggatcccaggtggacggtgacggaataatgccggcgatcatcgccgcctcagacagcgtcagatccttggcgtccttattgaagtatgccttggccgctgcctggataccgtaggagttgcggcccagatagatggtgttcatgtaattgcacagcacctcgtccttggattcggtctgcgcgattttgatggccatgatggcctcgcgtgccttgcccacataggatgtggtttcgcccatgtaataccgctcggcatactgctgagtgatggtggaaccaccttggcgcgtgcccttggtcacattattaatgaatgcgcgggcgatgcccttcagatcaaggcctttatccgtgtagaacgtacggttttcggacgccacaatcgcgttgccgatgtagtccggcagcccctcgcaagagatgatttcacgattctgctccgcgtaggagccgatcgcggtggtgccgtccgcgtaatacacggtggttttctcggccaacgcgaacttttcgggttgcgggacctcggtggtggtgtacaggtatgcgaatactgcgataccggccagcaagcccagtccaatcagggagaagaagatgcccagcacccatttcagtacacggtgtttgccttttcctgtgttctttttcttcctgttcggggctcgatggctattggaagccttgtggcttgcgtggcgggaacggctctcctggggcgtataggggccctcctgtgcggagtggccggctctgctttgcgcggtgcgcggttgcctcagagcggggccattgcctcccgaatgtgcacgacgagtataagaagccatggtgtccaccgtaactgttggccttgaacaatcgtttgacgtgagcgtaaccacacgcatttatgccggtatttttccggaattcttacaattgggcacgcttcttgatgttgcatgaatattgcctgaatgcgctggttggcctgccgtgcgacccggcgcgtacgtttcgtgtcgctgcgctggtccatacgtctccatagacttatccccagcctccacgcggcgctatgtcacccaactcccccagggcaggaatgcagcaagggtaagtggcctctgacgggtgcgtggaggttttctttatgtgcggatttggctgtgagctggcgctagcgtggtcccctgtccggggcgcggccgtacagtcgaacgtatgaatgacgcacagacccctagaattcgtgacccgcatgcggcggtcaatctggtcggctcaggcgcagcacagcctgactcgtcgtcgaacgttgttgacccattggctgcgctcggcccggtctccggttcagatgcatcggtatccacatcaggctccttacgggatttcaggccgctggacatggacgatgcggatggggcatctgatatcgaccgcggcttggcccggcttgacccgcttaccgtgcgcccgcgaatctccagccgcgtactgtgcgtggtattcggtctgctcctgatcgctatcggcttcggcgtgtggtgggggtgcgtgtttaccgaaaacggacaatcgtacgacgaactggtctggaaaaacctgcacaacgatgtaccgtcctgggccaccggcgtgatgaacgccgtcgcacaatcctggctggttatcgctgtcagctgcacaattgccgcaatcggcattattacggcgctgattcgacgccgctggtggttggccgggcaaatcgccgtgttcgccgtggtctgcttggccgtcacccgtatcaagggtctgttgccgcgtccgttcatcatcaacactgaatcgcctgccgctaattccgcgccttccgggcacacgatgctggccgcagcctgtgcggtgattctgctgcttaccgtgcctcgtgcggttcgagctttggcgggcgtcatcggcgtggtttgggcggtgaccgtcggtgtctccgtgatatacggacaatggcatcgcccttcggatgtggcgatgtccatcctgctggtggcgggattggccctgctcgctctggcagttacgcgcaagtccggcatggacgagccgggtcgccgcgtctcctcagtgagcgtgcaaatcgtcggcagcgtgctgattaccgggggcctgctgttgctcgcctacagcggttatgtgatctggcaggtggtgccggggctcaatgtcagcgccagctgggcggttcagggggcgaatgtcagcgctgttgtgggcattgcgggtgtggccatgctcgcattcggactgttgctggccctgcgtcagatcactgcagcgcccttaagccggctgggtctgatcggcgctccgccggcaccgcccaaacggtaaaacatggggtgcgaacggccgaatttgcccggcacaacggcggaatttggcagttggacatgattcatgagtattatgacgccagaaacgtcgtgtgtttcgcgcaatacataaggagtgggtatggctaccaaactggtgattgtggagtctccgaccaaggcccacaagatcggtgactacctgggcaaggggtacaccgtcatggcgtcggtcggccatatccgagacctcgcgcagcccagccaggtgcccgcggcagacaaggccaagttcggcaagttcggcgtggacgtcaacgacgggttcaagccgtattacattgtcgacggcgacaagaagcgtacggtcagcgaactcaaatcggccctgaagaacgccgatgaactctatctggcgactgatgaggatcgcgagggcgaggccatcgcgtggcacttggtgcagaccttgaaacccgaggtgccggtcaagcgcatggtgttccacgagatcaccaagaacgccatcaacgcctccctgaacaacacgcgcgatgtggatggcaatatggtcgacgcacaggagacccgccgcatccttgaccgtctgtacggctatgagctgtcgccggtgctgtggcgcaaggtgggcccgggcctgtccgccggccgcgtgcagtccgtggccacccgcctgatcgtggaacgcgagcgcgaacgcatggcgttcaagcgcgcgccgtactgggatatcgtcgccacgctgtccgcgcctgacgcgctgggggatcgtgccgaattctccgcccgcatgatcgcgctcggcggcaagcgactcgccggctccaaggatttcggtgccgacggccagctgaccccggacgggttcgcggcgaacgttcgccagcttgatgaggctggtgccaccgccgtggcttcggcgctgaagaccgccgatttcactgtgatgtcgatggaaaccaagccgtaccgccgccgcccgcagccgccgttcaccacctcgaccctgcagcagaccgccggcaatcgcctcggcatgggtgctcgcgccgtgatgcgcgcggcccaaagcctgtacgagaacggctacatcacctatatgcgaaccgattcggtgacgctgtcgcaggagggcatcaccgccgcccgcaacgccgtctcctaccatttcggcgacaagttcctctccgccgagcccaagcagtacgccaccaaaaccgctggcgcgcaggaagcccacgagtgtattcgcccggcgggctcgcgcttccacgacccggacgagctggcttccaaacttcccggcgaccagctgcgcctatacacgctgatctggcagcgcacgcttgcctgccagatggctgacgccaccggttccaccgccaccgtgcgcctgtctgcgccggccggccccaccgagggcgaggccgtgttccaggcgtccggcaccgtcatcgaattccccggctttatgaaggccacgggggagggacgcaagcccaaggccgccgctcccggcgctggggctggctcggaccaggctgctgccgccggcaagacggacgccaaggccgtcaggggtgacgcctccgaatccaacacctctctgccgccgatgagcgtcggccagcaggtcgaggcaagcgacatcgaaccggacggccatgaaacccagccgccggcccgctacaccgaggccacgctggtcaagacgctggaagccaaggagatcggtcgcccgtccacttacgcgagcattatctccacaatcatggatcgcggttacgtatacgagcgtggccgtgcgctgatccccagctggctcgccttctccgtgaccaagttgctcgagacgaacttccccaagctggtcgactaccagttcaccgccgagatggaaaacggccttgaccgcatcgcccacggcgaggaatccggccgcgactggctcacccacttctacttcggttccggcgagggcgccgcccgcaacgccgacgaggcgcacgaaggcctgcaacagcaggtcgcgcagctcggcgagatcgacgcgcgcgccatcaacaccatcgacatcggcgacggcctgcacgtgcgcgtcggccgttacggcccgtatctggaagacatggagcatctggacgccgaaggcaacccgaagcgcgcgtctctgccggacaccatcgcgccggatgagctgacggtggccgtggcccgcgatttgatcgacaaccactccggtggaccgcgcgagctgggcgttgatccggtatccggcggtaccgtcgaggtgcgcaatgggcgtttcggcccgtatgtggcgttggtgccgccggctgaggcttcggctggcgctgctggcgatactgctggtgcttctgcggccaagaagggttcgaagaaggccgcggccgccgccgcgtcgcgcccgaagatggcctcgttgttcaagacgatgagccctgaatcgctgtcgctggaagacgcgctaaagctgctgagcctgccgcgcgaagtgggcacatacgaggaaaccaacgccgaaaccggcgaggtatccgaatgcacggtggccgccaacaacggtcgctacggcccctacctgaccaagacgggtgccgacggcaagtcggagacccgctcgctggcctcggaagacgagatcttcacggtcgatatcgacaaggccaaagaactgttctcgcagcccaagtacggccgcggtcgtggccgtggtgccgccaagccgccgctgcgtgatttgggcaaggacccgaacaccggcaagaacgtgaccatcaaggacggccgtttcggcgcgtacatcaccgatggcgagaccaaccgcacggtgccgcgtcagtacacgcctgaatccatcacccctgatgacgccttccgactgctcgccgaaaagcgtgcggctggtccctccacccgtggccgtcgcggtgctgggcgtgctggtggcgccaaggccgttgccggcaagggcaagaagggcggtacctcggctgcggtttcggcgcaggaggccaagcgcgccgaacgccgtgccgaagtcaagaagttggcgaacaagggctggtccaaccagcgcatcgccgaaaaactcggttccacccccgccactgtgaaaaaggacgtcgactggctgaccgccaacgagggctacgagcgccccgccgtaattcccaagcgtggctgagcggaattattgctctacttgcgtttcaaggggctgatttctcgttttgagaatatctacttccgcttcaaggggctggtcatctgctgaaccacgagtatgaacggctccgcgccaacgtcattccgccgttttggaacgttgtctacttgggcaacagcccctcgaaacggaagtagaccttcagaaaagaccaaatcagccccttgaaacggaggtagagctggtttaactgcctgttgggcgcaactctgcgcctaacgctaaggtcaatagcatgagcggtctgtttgtttcgtttgaaggtgtcgatggcgtgggcaagaccacgcaagtcgagcggctgcgtgcgtatcttgaggctcaggggcgtaccgtggtcgttacccgtgagccgggaggcactgcgttaggcaaggccattcgccaactgctgttgcacggtgtggatgggggcgccgtcgacatcgcaccgcgcgccgaggcgctgctattcgctgcagaccgagcccagcacgttgccgaaaccatccgcccggcattggagcgcggtgaagtggtgatcaccgaccgctatttagactcttccttggcctatcaggccggtggccgcgaactcacgccagaagagattcgatccttaagcatgtgggccaccaacaacctgctgcccgaccgcacgtatttgctggatatggacccagccctgtcccaccatcgcctcgaacacgcggaagaccgtatggaatcggccggtgatgacttccagtcccgcacccgccaggccttcttggacttggccgccgccgagccgaatcgtttccgcgttatcgatgcgagccagagcattgaagcggtatgggctgccatcgaatccgacatcaaggagctcgcatgagcgtatgggattcactagtcggccaaaagccggtaatcgacatgctgagccgtatcgcgcagggcgacccgagccagatcacccagtcgtggctgatctgtggacctcccggatcgggccgttccaacatggctcgtgcgtttgcggcggcgctggaaagcccggatcacggcatgagcgctgagcccacgcgcgtcacccagcaggtgcttgccggcacgcatccggatgtcacggtgctgaccacgaacaaggtgactattggtatcgatcaggtgcgtgagatcatcactacctccgagcagatgcccgccaccgcaccgtggcgcatcatcatcatcgaagacgtggatcgcatgcttgagcgcaccaccaacgtgctcttgaaagagattgaggagccggccgagcattgcatctggctactgtgcgcgcccagcgcccaggacgtgctgcccaccatccgttcgcgcacacgcatcgtgaacctcgccgtgccctccacccaggcggtggccggattcctgacctccaccaccaatgtcgagccaaaagtggcgcagcgtgcggcccgactcgccgaaggccatatcggcatcgccaagttgtacgccaccgacgaacgggttatgtccgaccgcgatgaacttgtggtcggtgtgctgaatctgacccgtgcctcggatgcagtgttgttggccggcaatcttatcgacaatgccaaggcccaggccgaggcagacgcgaaccgcatcaccgccggtcaggaagcggaattccgccgcatcaacggactggcaccgagcgaccgcatcccgccgaaactgcgtggcgccttcaaccagattgccaagaaagacgatgtgaagcgtttggtcacccgccgtacgcgcgacgtattggatcgtgcgctgaactccatcgcctccatctaccgagatgtggcggtgctgcagaacaatgcggaggattcggtgggcctcatcaacctggagaaccgctcgtcgatcaccgaattgtcggtgcggttgaaccgggccggtgccgtgacccgtctggacgaagtggcccacgcccgcaagcgcctagccggcaacggcaacccgctactggtattcgagtccctcttctgcgccctgatcccataacccgacgcaactagcccccctctgatgagtgggggctgtcgagcgcagcgagactgggggagagaccccgtaacgcacagcccccagtacgtcacacatatgagcgatactgggacgtatgaagatttccgccgatttcaccgtcattccggacgatttcgccaaggccgcggcccctgaatatttcaatggtggcgtgcctgtggtctccttcccgttctacatcgatgatgtggatcccgaggcccgctacctgcactgggagttcgtggacccggattcgattccggtctgcggcttcgagtggattcactggtccgtggccaatctgccgattgatgcgctgatgtacgacttcaatgattcgcatgcgttggccatcccgccggacttctcccgtcagctgccggccatgattcccgagaccgtgcaggggtgcaactcctcggcctccaagttcttgggccgcagcactgacccggcggtgatcatgcggtacaacggtccgcagccgccggacaaggatcatgagtactacctgcaggtgtgggccaccaagaagccgttgcccggcttgaatcagggcttctggctcaacgagctgttgcacgcgctgcgcaacagcggtgaagtgcccgacaccgacggcatcttcctgaccggcaaggcgtgagccacatgagcccccgcaggcgggggctgtcagcatcactgactgggggtgggtcagtacaaaaccaccttcagtccgacttcgtcgtccagctcccgccagtgggagcgtgaccacaacaaagaaaggacaccatcacactatggcctgcaccacgattctggtaggtaaagacgcgagctatgacggctcgaccatcatcgcccgcaacgaggattccgcgaacggcgagttcaacccgaagcgcttcatcgtcgtgaagccggaggaacagccgcgcgaatacaagtcggtgatctcccacctaaccatcaccctgccggacgacccgctgcagtacaccgccgtgccgaacgcggacctcaaggaaggtatttggggcgaggccggcgtcaacgaggcgaacgtggcgatgagcgccaccgaaaccctgaccaccaacgagcgcgtgctcggcgccgacccgttcgtggaatacacgccggccaagggcgatgagcccgaggtgcccggcggcatcggcgaagaggacttcctgaccatcgtgctgccgtatgtcaagaccgcacgcgagggcgtccagcgcctcggcgcgctgcttgaggaattcggcacctacgagatgaatggcgtcgccttctccgactccaacgaaatctggtggctggaaactgtgggcggccatcactggattgccaagcgcgtgccggacgaggcctacgtgaccatgccgaaccagctcggtatcgacgaattcgaccttgaggacgctctgggtgaccaggaagcgcacatgtgttccgaagaccttgccgaattcatcgaaaccaaccatttggacctcgcggtggagaacactaccccgttcaacccgcgcgatgccttcggctcccactccgactccgaccacgtgtacaacaccccgcgcgcctggtacatgcagcgcttcctcaacccgtacgacgaggtgtgggacggcccggacgccgaccacaagcccacctccgacgacatcccgtgggcccgtcagcctgagcgcaaggtgaccatcgaggatatcaagtacgtgctgagctcccactaccagggcaccccgttcgatccgtacggccagctgggcgatgagcgcacccgccacatgtaccgcacgatcggcatcaaccgccagagccagctcgcggtgatgcagatccgcccgtaccgcccgcaggcctcccgcgccatccagtggatggcatacggctccaacccgttcaacacgctggtaccgttcttcccgaacgtggacaccacgcccgcctaccttgaggacaccaccacccgcgtgacgtccgagaacttctactgggccaaccgcatcatcgccgccctgtgcgatggcgccttccgctccacgtccaacgccgttgagcgctaccaggagaagaccggtgcgatgggccaccgcttggtcgccgccaccgacgagcagatcgcccgtctgggcttgacggccgccgaggaagccgcgcagtccgccgctgaagaggaatttgaggccgacaacgtggatggcgatgtgcagccgatgaccccggacgagaccatcgccgcgctgcgtaaccccgaggtgcgcgagattctcgccgccgccaaccagaccatggccgaccagctcaaggaggaaaccgaaaagctgcttgactccgtgctgtacactcgcagcatggaaatgaagaacggcttccacatgtccgacttttagtccgtattgagctcccctccctgaggggagctgaccgcgaagcggactgagggggctaagccgttaagaaaacagcccagtgggctgtttttaggcgaagaggcggcgactgccgccccaccaccccgccccaccacacaaacacagaaaggctttatatgaccaccatcgaagacttcaccagccagtacggtctggtccagaagatcgacgcattcggctacatgaagtacctggccgagaaccctgacgccccgcgcaagcacggcaaggtggtgctcgtcaccgccgatacgccgctcaaggcatcgcgcggagaaggcaagaccaccacgaccatcgccctgatcgacgctctgaacaagcgcggcattgatgcgaccgccgtgctgcgtcagccgagcatgggcatcaccgcagccggttccaagggcggtgcctccggcggcggcaaggcttccctgacccaccccgagctcatcgactggggtctgtgcggcgaaatgggcgccatcgaggcggcccagaacctgctcgtctccttcgccgagaaggccatcgatgacggcaagctcgacacgattctcgtgccgcgtgtctccgaggtgccgagccgctccctgcgctccaccgccgtggactacggcaagggcaacgtgccggagaaggtcgtgctcacgccgacctgcgagctcatgcagattgtggtgctctcccgctcgatggacgagatttccgagcgcgtgtccaagatgatcgccggcaccaaggacggcaaggccgtgaccttcggcgaattcgtggacctgtggcgtatcactggcattctggccgacgcggtcaagccggccaagaccgagaccgtaaacggctccccggtctacgtgcacggtggcccgttcgccaacgtgtccatcggcattccgacgctggtctccgtggaaatggcctgcgccctgcatgacgtggtcatcgtcgaggccggttacggcaccgacgccggcgcccagaagtggctggacatcgcctgccgcgaatacggcgcgcagtggccgtccgccgccatcgtggtgacccgtgcctccacctggcgcgacgatcccgagctggcctggcgctacccgttccacgtgcagcgcctggagaacctggacattccgaccttcccgctcatcaacctgtgggaaggcgaggacgatcaggttccgtccctgaaggccaccgccgacgagctgggcttccgcacgccgatcatcggcaacctgttccgcgacggcggcgaggcgctggccccgcagcttgacggtttcgtcgacgcgttgcagaacggctccatgccggccgaaccgtactcgcacaagggcatggccctgaccgagaacgccaagtgggtggccgagaacgcctacggcgtaccggccgagcgcgtgatttacaagccgggcttcaccgagtccgtgtccgaggccatggaactgtgccagagcgcaggcatctcgctggacgatctggcgttcgtggcggtcaagtccccggcgaccatgaccgacaacgaccgtgcccccgaagaagagcgcaccgtgaccctgaagaaggtcgaggtgcatgccggtgccggtctggtccacgtcaacctgaccaccagcctcaccacccccatgcccaagatcgtgtgatgacaggcacgaggtgaggtaactcgctttcgaggggggaatggtggcaactagaagttgccgccgttccagccccagtcggtggtggcggtgtaacggatgtaggtgcggtcctcgggaatgccgagcgtggagttcagcgcggccataatgctctcggtcagcttttcccaagcagagcccggcacggagcggccgaacacgttgacctccacataggcggcgggctggtcatcgctaccgccgaagtaaatcggcatattgtcttcgaacgggcacatcagccagccctcggacttgcccggcacggcggtaatcgcctggccataggcggccttcagtgcctcgcgctgctcaggggtggtggacacggacacatgagtgtgaataacgggcataattcctccttgattcggttcgcttccagtctagcctcagcggctgctgttgaacatggcatgcggatgtaggaagctgcttgcagaacggaccggggcaaggccaattggggagattattggcctttccagccaatatatgttccgcagtcagcccaatagtgttgaatacccttgtgagaaaactgattgaacaactgatgaagttcggcattgtgggcgtcatcgcctttgttatcgactggggtatcctcaacctattggttggcatattccacatgcacaacgtgctggctgccaccgtctctttcatcatctcgctgattttcaactatctggcgagcatgaaattcgtattcaagcatcgtgatgacatggcacgctggatggagatccttatcttcgtggcgggcgctgtagtcggtctgttcatgaatgacgcgattatctggatttccacttatggcatgaaccacgatgcctatgtatcgcagcatgccgaatatctgttgcgcaccaatatcggcaagctggtggccaccgccgtggtaatgatctggaacttcttgattcgcaagtggctgctcgacgatacgcacaccaatgcgatgaaccgtctgaagtccgctgaaaatcgattgaatgccgaggagcttgaagccaagtggcagaacagcttctcccacaagctcggcatctggtccctggaacacacgcccaaaggctggccgaagtagcggtttgacgtattaagccccctcgtcagagggggcttaatttttgtctcacacactcacttcagtcaaggtcggctgctcggtggagcccttgatctgcttgaagccaatcagcgcaatcgccagcgagaccagtgccaaagtggtcaccaccatgaagccgccatgcgagcccatgcggtcgatgaactggccggcaatcgccgaaccggcggaggagccgatagaattcatcgcacccatccacgccatgccttcggtcaggcgggaaggcggcaccaagtgcagcatgagctggttgccgttaatccacgtcggagcctggcacacgccgatgatcaggtagatgatcataatcacccacagatgcttggcgaacaggaacgtgctgatgccgatgttcaccacggccaggcagaagtagaagcgcttccacagggcaatcgaccagttcttcgcgccgtacaccaaggcgcccatcaacgagctgatggagaagcaggcgaatacaaagcccgtgtactgcttcatattcgactcggtggcgaatgcgatgatcgagatgcctgtagccgactggaacgcgcccaagccgaaccaggtgacgcataccgcaatcagacccggtccccagatggacgccttcttgccggaacgcgcatcggcgaccgcctgctcaatggcggcgttaatcgtggcctcatcggtcacgccttcgcgctcaagacggcggcgagtctcctcggctgcggtctccaccttcaacgcttcggctcgagccgcctcgcgctcacggtattccttgcgggaaatgccctcagcgcgggccagctgagtctgtgacggtggctcagtggtcagctcggtcaagaacatcagcgcgcccaccaccacgcacatgccggtgaacgagaatgccagcagaccggagatcacggccagtgtggaagccagtggattgccgattacccacatgcattcgtccagcacgccgcacagggagagcgcacggttggtacgctcctgatcgcccttcaggattttggtccagcgcgcgcggctcatcgcgccccacggcggaatagctgccaggaacggcgtcaaacagtacagcacccattccggcgcgcggttggtaatcgccgtcaccagcgcgatggcggccacaatccaaacgataatcgtcggaatcgagacctgcctctggccgaacttgtcggtcagcttgcctagcagcggcgtggccacggccagcgcaatcgcctgaatggcggtgagcatgccggccagcgaatagttgccgtaataatgctgtacggaaatggtgatggtcatgccgaccatcgggaatggcatgcaggcgatgaccgagccgatggaataacgggcggtatgcggaatgcgcagtagttccgcatacccaccaaaaactttgtggcctgcttccttgatgccggccagaatggcgcccgagttcgagttggacgagttattggacataacagcactacgctcctttccgctcccgattggatgtcccccgctggtgtggcattgccggcgaagccctcatcgaatgatgtgttgtccatggtcgcgcaaagtttgcgtcggattttcccccatccgcatatttgcgtcatggatactctacgggtgtccactccgcgacacgcggtagattggagatattaagacaacgttctcatgcccttcagggcgggaagcagaaaggcgactcatgagcgctactaccatccatttcgtccggcatggcaaggtatataaccccgaccatctgctctatgagcgactgcccgacttccatctttccgaccttggccgtcgcatggctcaagccaccgccacgtacttggccaagaatccccaaaccaatacgattgcagccgtctactcctcgccgctcgaccgtacgcgcgagaccgccggcgcgattctcgatgcgctgaaccccgtgcgcgaggctcgtggcgaggctccgctcacgctcactactgatgaacgggtgattgaggccggcaacgagttccgtggcaagcgcatcggccatggcgagggcgcgctgtggaagaacggcaactggaagctcgtcaccaacctgtacaagccgagctggggcgagtcctatcagcacatcgcggcgcgtatggacgacttcgcccgcgagaaggtggcccagcaccccggcgagcagattgtggtggtcagccacgaatcgccgattttcagttatcgccattatctggagaccggccaccccgagcactggatgttcctgcggcacacggcgctcgcctccgtgacctcggtgacgtacgacaacgaaaccggccgtgtgatgtcaatcacgtatgtcgacccagcggccaacgtcaagtaacggcacactggtgttaggacattggttcccctctctgaggctgagccgtgaagcaaacagtccagtggactgtttgtaggcgaagacgagccgataggcgagctattgaggcgcgggcgtggcccgtccgcaattgctgctgagctgtcaccgtaggtgactgaggggagccaagagacgcactacaatcgagtggtggacgcaaaggagcatagatgaccattgaactcaatcgtgaggcaatcgcacaggtcacggcattgccggcggtaactgaggccgccgaagccggctcggcgctgatcagcctgtggccgttgaccgaagccatgcagatggacaatgacgccaagtacgcggagaatctgcaggttcgcgtcacgcgcgcattcgcccgcgtgctgaccggtgaagacgtcacggtgcccgatgccgaattcgtctatgaaggcgccgatgagattcccggccgcccacagaacatcgtcgatacgctgctggccgccaacgatgcctacgacacgatggccgactactccgaatccggcgatgtacagctgatctttgacgccgccgaagcgttggacgttcgttgggacaccgatgttgcggctcaggtccgtgagacgattgccgccgtggaagcccagattgaagacgacgccgcgcagggccgtctgtctacgtccagcgagcccgctgatgtggccacccgttttgccactgcgctcgccgtgtgcgatgcgctgctgagcgtggtgaccggtgacggcgaacacgatggcgacgccgcagctcaggcggtcaaggtgctgccgattctgctgtacgtcaacgagctgcgcgagcagtgctcgattccgcgcatatgcctgaccgatcagcagattcttgagctgattgatacgcgcgctaaggccgctggcgcggacacgctgaccgccaccgccgaatacattgccccgctggccggtgccgaatggaccaagcaccgcgacgatgtgctctggaacccggacgaagccaagaagaaggccaaggaagaagacgaaaagcgcaacaaggaggccttggccgccaagtttgcgcacattaaagatgaccctggcaaagaaaccgtggagttgtgagaatcaaggcagcttagcccgcctgatcggttctcttacccctgctcgcgattcctccgtgccgaggaaatcgtctatgtggtgaagaacatcgcttacgcaacggaagaagaaacacttatgggcaatggcgtcaatctgcgcacgctcaccaatgacggcggtagcgcggtaatcagcgattacggggcgcatctgctgcgctgggccccggcggggcagccggatgtaatctggacgccccgcacatggcatttcgaagctggtcagccggttggcgggggagtgccggtgtgcttcccctggttcgggccggggtttgtgcatggcgggcagactgcgaagcgaccgattcatgggttcgcacgattgcgccagtgggcgctggacgaaggggcgtttaccggtgcccgtgtgcggtatgtgctggattccgaacgactgacgactggcgaagtgccatggatcgaggatgaacccaacgtgcgtttccatgccgcatacgaggtgtgtgccagcgatacgctgacgatgacgctgaccgttaccaacacgggaggtgagccgatgtcgtatgaggcggcgctgcactcgtatctgcatgtcggcgatgtgctcggcgcgcggctggtcggtttgcggggtgcaacatatctggatgccacggaagccggattcccgccaaaactacaagaacagccatcggtgatgttcggcgatcagccggtggaccgtgtgtattattccgatgctgcactggaattgcaggaccatgtgctgggtcgtgtgattcgcatcggcaagaccggctcgccgcagacggtggtgtggaatcccggagagcagggcggcaacgccattgcccatgccaagacgggtgaatggcgtggctttgtggccgtggaggcagcggcgtgccgagaccgtatcgttgcccttagtccgggtgaatcgtatatgctttcgcagtccattgccgtgatgccgttggggtagttggctgaatacagtgccgataatacagtgccgagaatgatgaagccctactcgcgttgagtagggcttcatcattggttgcggggaacttcttcaacggaagttcaccgatatcggttactggccttgccggggtttctgggcattgtcgccggcgggagccgtgtgctcagaaggtgttgcggattcgtcgccggcgttttgaggcatcggcggaacctggccgtactgtggggccggggcctccggttggccgtactgcggggccggcacctgaccgtaatcaggtgcgggtgcagccggctggccatagtcgggggttggcatgggcggctggccgtaagccggggccggctggttgaagccgggtgcgggcgcgttcggagcggcgaaattcgggggtacaggcgtgctgtatggtgcgccgtaagcaccctgaggcatgggggttgccgccgcgccatcgtcaaaacgtgcgccctccggcttgctgggaagagccatgaacacgatatagacaacgcagccggccagcgtaatcaacgcaccaatgaccgccgcgccaagaccgccggcggccatgctgccataaccatagtcataactgccaaggctcctgaacccgccgtacagtgccgcaccaccgccgataatcatgatgataaggccgataaccatcgcgatatagaaaatggcaacccaccagccaggcttgttcgtgtcatgcagacggcggacggaaagtgccagggtggggattagggtcaccagaccccaaatggtggcgaggaagccaagcttttcatctgtggcggtgttgaggatgtccagcactatattgatgccgaaagcggccagcacccaccaccagaattcactgcgggacgcgcggcccttgaacaccgtgtacttcttccagaagcgcaggaaggcttcttggaaggagcatccgtagtaaggcttatccagcggcacagtggcagtgggcgcggcgtattggccgtaagacggcggaaccgggccgtaaggattgccatcgggggccggtgtgccgtacgccggtgcggattgaccgtaggtgttggcgtcgggcgcgggctgaccgtaggttggtacggcctggccataagagttcgcggtcggagcaggctgaccgtatgccggctgtccgtaagcgggctgcgccggctgtgagggctgcgccggggccggtgcgccatactgcggtacgggattaggtgtgggcgtaccgttggcctcaggctgctgaggcaaaggcacattgttgggatcagacattgattcccctttcataagacctatgtgtcacatcatattcttccattgcatgagtggaaaactcaacaattgcgccaaataatgtccaaagttgtggtgaatgcactggaaagaatcgatggttatcaaatcgatatcagttgagggtgaacgttatcgatcggttgtgtaacctgttgcatgaatattgcgcacagttgcggggcggaactggaaagcagacgaagcttttggcgctatgcataaagcaacatacagagatgtagggaatgccatgaaccacgaatacacggatgccgccgttgagcagcgcgaatcgcacgaagacgaatctcaagactgggatctgctgttcgtgggcctggcctgctgattctcgtttgctgttttcttttcttttgattttaaaagcttttaaaagaaaagaaaatggcaggcaaaagagatttcgttggaaaatggccgttttgggatggtgttggcccgaaacgtcaataacgaagcaaaagagcgaggagcgctgctctccgcgtccggcgcgcgcggcacaataggggactatgactgatgctgaaaacaccaaacctgaactgcccaagaacgttcgtgttcgcttctgcccgtcgccgaccggaaccccgcatgtcggcatgattcgtaccgccctgttcaactgggcggaagctcgcgccaccggcggcacgctgatcttccgtatcgaagacaccgacgccgtgcgcgactccgaagaaagctacaaccagatcctcgaatccctgcgttggctgggtatcgactgggacgagggcatcgatgtgggtggccctcacggcccgtaccgccagtccgagcgtaccgccatctacaaggatgttgccgccaagctgctcgaagccggctacgcctacgagtccttctccactcctgaggaaatcaaggagcgcaaccttgccgccggccgtccggccgagttcggctacgatggctacgaccgcaacctgaccgatgaacagaaggccgccttccgcgccgagggccgcaagcctgcgctacgtatcaagatgcctgatgaagacatcgcctttgacgatctgattcgtggcaccatcgagttcaaggccggctccgtgccggactacgtgatcgtgcgcccgaacggcgacccactgtacacgctgaccaacccggtcgacgacgcgatgatggaagtcaacgtcgtgctgcgcggcgaggacctcctgagctccaccccgcgccagatcgtgctttaccgttaccttatggaactcggcatcgccaaggagatgccgctgttcggccacatgccgtacgtgatgggccagggcaacaagaagctctccaagcgcgacccagagtccaacctgttcaaccaccgcgacaatggcttcatccgcgagggcctgctcaactacctggccctgctcggctggtccattgcaccggaccgcgacgtgttctccatggacgagatgaccgagaagttcgacgtgcgcgacgtcaaggccaacccggcccgcttcgacatcgacaaggccatctccatcaacgccgagcacatccgtatgcttgagcccgaggacttcctgcgccgctcggtgccgtacctgcaccgcgacggtgtggtttccgccgacaactgggatgccctgaccgaccgtgagcgtgaggtgctgaccgccgccgctccgctggttcagccgcgcgtgcgcctgctgggtgaggttgccggcatggtcggctccctgctctccaccgagggctacttggagccggctgacgacgccaagaagcagctgaaggattctgccggcgaggtgctggacaaggccatcgccgcactcgaggctgtggatgaggctgactggaagaccgacaacctgcatgagaccctgaacaaggctctggttgaggagggcggctacaagccgcgcctcgctttcggtccggtgcgtgtggccatgtctggtcgtcgcgtgagcccgccgctgttcgagtccatggagatcgtcggcaagccggtttccctcgctcgcctgaagggcctgcgcgagcacctgtgagctaaggttccttccgtgctcggctgagctgtaaggacactcaaggtgggcgtctgcatgtgcagatgcccaccttttcttgtattcagtgatgagctggaacagctggaaagtcttaccgctgcgccgcatgccagtgagaatatgtacgaggttgaacatggctggtttgtgcagtgaggtcacgaaacgtgccttgtaggtggtttcgccttcatgcgtccatgaaacggttgataggtaaccgggcggcggtctttgacgtgacattgcattacaagcatcgcgacgcgctcgctgtcgcaagggaacataagcgcctcatttggttcttgaaggctgatttgccggctatgaatgtgcaaggcaaagatcattgcctcatctgcaatttcatcagtgcattagatggtaattcatcagtagtgcttactgataatccgtcagtagagttcatgcaaattcatcagtagtggcagcgtagcacttgaaatcgttgaaattccgcgcgacacgccgtaagttgcgtaagggtgaatacttgcgtatatttatcactcgttgcgcggttcaccgagcagccggttgaaaaactgaatatgcccccatcgtctagcggtctaggactacgccctctcacggcgccaacaccggttcaaatccggttgggggtacgacgaacaactccttggagttgctacgccaagccaaattgggatgtggtgtaattggcaacacagctgattctggttcagccattcttggttcgagtccaggcatcccagccaatgaccctcgcggaatgcgagggttttttgttttcagggaagtagccgcttgaaaagcggggttaagggtcaaaatgtgtgtctggctcggcgtgtcgcgggggttagatttggcctttttgaatgccgattgagtgggtgtagtcggtgtcgatagcgttgtcgtagagggctgggcgtcctgtttcgtggtcggcttggttctcggtttgggtcagggtggatactttggcgagttggccctggccccagtcggactgcctggcgattcgtactggatcgtcaggcagttccgtttttaagtagagccaccaatccagcatgcggcgttgtcgttcgcctgatctgccgcggtgggttctggcgagcagtttgagctgggcgttgatgccgccttctaagctgttggtggtggatttgatccgctcgggcgcaaggactcctgctggcgggttgaggtagacaaacagcatctcggaccgccaaagatggttgaggctgttgtaggccttgcgcacgttgtggtgggtccacacgcgggtccatgcacctgttttggggtctttgatcatggttttctcgttcatccattcccggtagatcgttgaaaactcgtgcagttgcacaccccacgcggcggcttcatccagtgtggtgatccgggtcagtttcagcgcaagtcggtagatggtgcgcccggcatcggtgcgtgggttggtggtggtgtagcggcggaccacgcgttgggcgtggacgaggcagcgttgaattttcgtagtcggccagcactttttgattgcgctgtatgcgccttggccgccgtcgatgacggcgatgagtggggcttcgatgcgttcaagcagcagttggtagtcgcgggtggtttcgtgtttgcaccagtgccaggcgatcacgtggtcgatggtcgccgcgacgatcaggcagccaccggcggtgtaggtgccatcgagaaatacctggtcgtagatccgcttgtggtggccggcggtggggtcaggcacatcaacgagccagcaccacttgaagcgccgcttcatggtggcgcggctaacaccgtttcgtttggctaggtcgtcgagtgatattgcggtggtgcaatgctcgatgaactgggtgaacactgccgcgttggtgatgtcgtttcgacgtttgacgctggaggcgccgcattgtttgcagcgccatctggtggtgcctttgctggtggtgccgttgcgtttcatttcaccgccgcagtggcagcgtggttggttcttcgacattgcgacaccacaccacgccgcgcatagcacatcacggctgccacaccgaggatttcccgtcgggggctagatatatgcttccggagcatatactttccggaaacctacaggtcaatccgtgaaaatccgcgattccggacacactttttgacccttaacccagattgcacgcgtggggattgagggtgtgaatcccactgtcgtgggtttgatgaggtagtcgatgttgcggaagctttggcatcggcgtgcgttgtgctccgtacgttgtttcaaaaacgggtttcatcaaacggaacaaaacctgggacacttcatatcccaccccaggcctaatgacttgggtgcagcggcaacgctcatccgatttaggcagagtcgttgcaggatccagtgggtcacctggtccgtggtctttgaattgtcgggcgcgcaggcaaggccagcacggaagatcttctgcaagcaacgcttgttggtgcaccggtagcgtggaaggcgcacatgaagttgttgggtggccgacgatgggcagatcgaccaggctgcggatgacgtggtcgcggaatactccaggctgcccgcaggtagggcattcattgatcggctcgacgggttcggcttcaataacagtgacgtcaccgttttctgtggcaccggtgatagtagttcctagttttgcggtgcggcagatggtatcgacgatgacatttccgttaggctgcacagtaggtccttagttttgtacggatggattagatacctttttcctacaaagccaaggaccccaatatcttgtgccacgcccgaacccccggcgaactaatcaatgcactctaaaaccggaagagcccttttagtactactggtggatttcggttttggtgggggattaacgccgccggcttcggtttttccgttgaggaggtcgttgactacttcccgatggtgaaatgggtcgatggtgaggtagagaggaaccagtcacctggaagagatcgatccagtcgttggtgtgcaatctgggaggtagggtcgcggggtcgattcctcgcgagcgcaaccatgattgtgtttctgaacgtgatgaaaacaaccctgcccttcggagaatttcccctatcccgcgtccccgggcagtgaaaacggtgtgcaccatcgcctgaaaggctttgcgctgctctatcggaatcttcgggtcacccacccggcggatcactaagatccccccgtcaacgtttggctgtggccggaaagcagtccttggtacccgagaacccaggtgaaatgtgaaccatggggaccactgagccgtcatcatcgtgcttgcgcctaccccggcccggcggcgagcgacttcccactgcatgaggagtacagcgtcagtccatgctggcgcatgcagcaactttcgaagaatggcagtggtgaggtgaaagggaatgtttcccacaatgacgcagggagtggcgggtaaccggaagttaaggaaatcatcatggaccacttcgaccgccgccgaggaggtttcttgtgtgattttggcagctagttttgcgtccacttcaactgccgttatcgccctccccaagtgggccatcgggtgagtgagggcaccgcttcctggtccgatctcaatgatggggccggaggtttgtttcacaaggtcgatgatggagttgatgatcttgtggttggtgagaaaattttggccatgctcgtgacggccgtgtccgtatgcagacataaggtgtactccttggatttgaaaggagccgggcatgacaaatagctgcccggctaaaggaccggagcggtttttaacctacgggtaggaaaccgccttagcggttggtgcgcaaccgcaagaaagcgatacctgaaatcaacatgggtctaattatatccattaaagcgacttccctgcatatgagtgcgcataagagcgctaagagcgcatacgtgtgtatgaaagtacgagaacgaaggagatcgaagtatgtccgctgggcagcaggctgtaccggcaaacaacgccaacaatgcaagcaatgaaggcgctcagaagaagcacatgtctaaggcggccgtcgccattatcgccgtggtggccgtggccattatcgtcgtggccggtgtgttcggcttccgcgcctactccgatgctcagtacaacaatgcagtcgccacttgcgccgccgcttccgaaaatgtgcgcaacgccactaatgactacaacaacttggtcaatggcgatgcttccgaagctgctgcgctcaccaagaaggatgtaaaggatgcctccacgctggacgccctcaacaaggaactgagcgtggaactgccggtatacgaaggctgcgtagctgacgacactgccggcttcaagtccgctactgcgaagctcaacgagcaggctgattggtacaaggcttatactcaatcgctgcagaaggctgtggatgccgtgaacgcttccaagaagtaagcgagcacagcctcaccattgtcgtcaaagccgtcttgcggttgcgcaaggcggcttttgctattttgctcaatcggcttgctgctgtaatgctgctgcattgattgcgtcgaatgcaggtaaattcgtcttactttttttgcgcagtttttccctgcgcgtgtcgcgatgatgcgaatatagatgtgaaggttaacaacgtagtcgtttattgggttttgtgatttcactcacgttgtaattcaatgtcaaatatgtggcgattctccgtatttgctgagattgctattaagaatagcttcttgtaaagtgtcttatcgtaattgcgaatgcgtattcttcaatgaagaaggcatctgcttcacctcgaagaagagattaaggaaaatatagttaatgaaaaagaagaagactatatcggctgcgctggcaacagcgttagccttaacctgcatgggcagcgggggaggtactgcgttcgcagtgcccctgtctgatgctgacttgcagactttggcaagtcagattcagcaaatcaacgatacttctgattctgcaactgcttccgagactccttccgcacaagccgatgcggttgaaggctggactattgattccaacatcgctcagggcggcgaaatcctggagatggcaaacggttggctgcacctcaagtccactgcctctaacggtaatgcggcagcgaaccccagctccagcaacaactggccggcagtagccgtatggggcacagattacgacttctccaaggccggctccttccacgccaccatcaaatccccgcaggaaggctccgccaaccgcttcggcttctacctgggctacaacgacccgggcagcggcctgttcatcggctacgattcggacggctggttctggcagacctacaccggtggcggtagcggcagctggtacagcggtgctcgtatcgctgctccgagcgccaacgaagagcacgacattcaggtctcctggaccgacgccaaggtcgccacactgaccgtggatggccagaaggcattcgatgtcgattactccgcaatgacgaacctctccaacaagcttgccatcaaggccggctcctggaaggggctgaaccaggtcaccgacgtgtacatcaaggacttcccggaggttgtcgaagccgccaagcacgcggtttccggcaaggttgtggacgctgaaggcgctgccattgaaggcgcaacagtgcgtttggataagaccaaggtgaagaccggtgcagatggcaccttctccttcgccgacattgaagaaggcgaacacacgctttcgattgccaaggaaggctatgaggacgtctcccagcaggtgacggtctccggcgcggatcttgccatcggttccatcaccctgaacaaaaccgttcaggtcgcctccgaaacgctgaagaccaagaagatggaagttcagattaagaagaacttcccctctgtgctgcagtacacgatgaccgacggcaaggtgatgtacggccagtccaaggatgtgcgcaccgttgaaatcaacggcaccaacatcgaactgaccgacgatgacgtgaccttcaagaaggtttccgacaccgaggccacctacacgctgaaggtcaaggatgaggccaagaagattgacgcggtgatcaccgttcagatcacggtcaaggccaaccagctgcatctcaacgtcaccaagatcaagaacaacctgtccgaaggcattcctgagggcaacggtgtggaggagaacgccatccagacgctgtccttcccgaaccagagtctcgtttccgtgcgttccagccaggaaaatgcccaattcactggtgctcgtatgtcttccaacacgcagaagcctggcgataccaacttcgcagtgaccgaagatactaacgtcaccgatagcgactacacctacggcttcatctccggtgctggcctgagtgccggcctgtggagcaactccgagcacgatggcacctatgtggcggctcctgtgcgcggcggcagccagaacacgcgtgtctacgccaccacccagcagactggtgacgccacctccctgggcctggccagcgctccgtggtactaccaccgcacggtcaccgattccaagggcaagaagtacaccgtggccgaaaccgctctgccgcagatggccgtggccatcgccggcgacgagaacgaagacggtgccgtcaactggcaggatggcgcaatcgcctaccgcgacatcatgaacaacccgtacaagtccgaggaagttcccgaactggtggcatggcgtatcgccatgaacttcggctcccaggcgcagaacccgttcctcaccacgcttgacaacgtcaagaaggtggccttgaacaccgacggcctcggccagtccgtgctgctcaagggctacggcaatgaaggccacgactccggccacccggactacggcgatatcggccagcgtctcggcggcgccgacgacatgaacaccatgatggaagagggctccaagtatggcgctcgcttcggtgtgcacgtcaacgcctccgaaatgtatccggaagccaaggccttcagcgaggacatggtgcgccgcaactctgcaggcggcctgaggtatggctggaactggcttgatcagggtgtcggcatcgacggtatctacgatctggcatccggttctcgtgtaagccgtttcgctgacctcagcaaggaagtcggcgacaacatggacttcatctacctcgatgtgtggggcaacctgacttcttccggttcggaagattcttgggaaacccgcaagatgagcaagatgatcaacgacaacggctggcgtatgaccaccgaatggggttccggcaacgagtacgactccaccttccagcactgggcagctgatctgacctacggcggctacacctccaagggcgagaactccgaagtgatgcgcttcctgcgcaaccaccagaaggacagctgggttggcgactacccgcaatacggcggcgctgccaacgccccgctgctcggcggctacaacatgaaggacttcgaaggctggcagggccgcaacgactatgccgcctacatcaagaacctgtacacccatgatgtgtccactaagttcatccagcacttcaaggtgacccgctgggtcaacaacccgctgctgaccgccgacaatggcaatgccgctgccgtgtccgacccgaacacgaacaacggcaacgagcagattaccctgaaggattccaacggcaacgttgtagtagtctcccgtggttccaacgacacctctagcgcagcctaccgccagcgcaccatcaccttcaacgacgtgaaggtggcttccggtgctgtctccgcaggcgatggttcctccactggtgacgagtcctacctgctgccgtggctgtgggattcctccaccggcaagctggtcaaggattccgaacagaagctctaccactggaataccaagggtggcaccaccacttggaccctgccggacagctggaagaacctctccagtgtgaaggtgtaccagctcaccgatcagggtaagaccaacgagcagaccgttgccgtctccggcggcgaggtgacgctcaccgctgatgccgaaaccccgtacgtggtgtacaagggcgaggccaagcagattcaggtcaactggagcgaaggcatgcacgttgtggatgctggcttcaacggcggctccaacaccctcaccgacaactggaccgtcagcggctccggcaaggctgaagtcgaaggcgataacaacgccatgctgcgcctgaccggcaaggtcgatgtctcccagcgtctgaccgatctcaaggctggccagaagtacgcgctgtatgttggcgtcgacaaccgctccaccggcgatgcatccgtcaccgtaaccagcggcggcaaggtgctggccaccaactccaccggcaagtccatcgccaagaactacatcaaggcatacggccacaacacgaacagcaatacggaaaatggctccagctacttccagaacatgtacgtgttcttcaccgcgcctgagaacggcgatgccacggtaaccctgtctcacaagagcaccgacggagcacacacctacttcgacgatgtgcgcatcgtggagaaccagtactccggcatcacctatgagaaggacggcacgctgaagtccctcaccaacggattcgaaaacaacgcccagggcatctggccgttcgtggtctccggttccgaaggcgttgaggacaaccgcatccacctctccgagctgcatgctccgttcacgcaggccggttgggatgtcaagaagatggacgatgtgctcgatggcacttggtctgtgaaggttaacggcctgacccagaagggcacgctggtctaccagacgatcccgcagaacgtgaagttcgaggcgggtgccaagtacaaggtgagcttcgactaccagtccggttccgatgacatctacgccatcgctgtgggccagggtgaatactctgccggcagcgtgaagctgaccaacctgaagaaggctctgggtgagaccggcaaggccgagttcgagctgaccggtggcgtcaacggcgattcctggttcggtatttactcgaccgcaaccgcacctgatctgcagggttccaccggcagtgcacaggacttcggcggatacaaggacttcgtgctcgacaacttgaagatcgagcgcatcgagtcccagacccgcaccaaggccgaagcgcaggacaaggtcaaggaaatccgcggcaagtacgattccaagcgtgctgagctctccgatgccgcatggcagcagtatcaggacaccttggtcaaggctcgcgtgctcatcaacaagaatggcgcaaccgctgaggacttcaccaaggcatacgacattctcgtggccctcgacgagtacatgaagaccgctcccggcaacgagagcagcgacaagtacgacgtggcagctgacggctccgatgagctgggtggctacaccgtggccacgggcagcgaagagcctaccgcaggcctgccgagcgaaggcccggccggtctggcacaggatggcgacgacagcacccactggcacaccagctggagcaagaacgcagtcggcaacggcgccgcatggtatcagttcaacctcaacgaaccgaccaccatcaacggcctgcgctacctgccgcgttccggaggtatgaacgccaacggcaagatcaagggctacaagatcacgctcactctggcggatggcaccaccaaggatgtcgtcaccgatgctgagttctccaccaccaccatgtggcagaaggccagcttcggcgccgtcgagaatgtgaccgccgtacgcttgaccgtcctgtcttccgcaggccagagcgactcccaggccaacaagttcgcatccgctgccgaactgcgtttgaccacggaccgcgaggttgaggaagagactgtcgctccggacaagaccgacctcaacgacaccatcgccaaggctaacggtcttaaggaatccgactacacggctgaaagctggactgctctggtcaaggcccgcgaagctgcacaggccgtggcggataacgataaggccaccgcttacgatgtggctctggcgctgacgaacctcgaatccgctatcgctggtctcgagaagaccggtgaggagcctggcccaggcccggttgaggtgaacaagaccgacctgcagactgcagtgaacaaggcaagcaagctcgagaaggccgattacacgaccaactcgtgggaagctttcgccgaggcactgaaggctgcacagcaggtgctcgacaacaagaacgccacccagcaggatgtggataccgcactgagcgctcttcaggacgccatctccaagctggaagctgccaccgagccgaagccgaatccggaaccgggcgtggtggacaaggctgctctgaacgcgaccatcaacaaggccgccgccatcaacctgggtctctacaccgacgactccgccaacgctctgcgcgccgcgctgaagaaggcccgtgaggtctccgacaacagcaacgccacgcagaagcaggtcgacgcagctcgtgaggctctcgagaaggcaattgccggcttggtgaagcgtaccgctgccaagggtgatggcaatgtcgtctccaacacgggtgccaatgtcgtcacgattgctgtggccggattgctgctggccggtgccggcgccgcaatcgcctaccgccgcaatcgcgagcagatgtgatcatgaaaccgtaaggttcgcgaccacataaggagcactccttattatctcggccggtgccggtcagcaatgcccagcgccggccgtttttgtatgaatcagtgttttccggtcacccagcgggcatcggaatgcacatgggggatcatcatcacaatgaccgcaatcagacagacgatcatcaccatcaaaataacgtcctcatgaccgcgcgtctgcagcgtggctccagtcaaagcaccgagcgccaaagccagcattacaatcgcgcgccggccaagtttggactgctcatgaccatgcgccgaagtgtcagcgataatcccagttaacgtcatcgtcaacacagtcgtgggcaaatctggcaccgaaagcttacgagcagtggaattctgaatgcccatagccggtgcgagcagcacaatcagcagaataatatgcaaatcaatatgccgagcagttgggaagttcagactgggctgtgccgtgcgggcgatggctgaagcatcagtgccacccatcgacggttcaggcgcaaactgattgagcagataaatgccgacgagcgcagctgccacaaaagccagctggattgacgtggacaccagcagatggcgcgcgcggttggcgccaaagtaatgaataatgcgtccgccgatgaacgcaccaatcatgaacgtggccagcgtgagcgccgaagtccaccagacgaagccctgcgcgtgggcgaatgcaaaaccaaggaacacaatgttgccggtcacattggccacaaatacatgaccgagtgccaagtaacttaacgcatccaccagtccggcgacaaacgtgagaataaccagagctggggaaagcagaccgtaccgatcatccttgcggggaatcagtgtgcgtcctgcttcggcaaggtgtgaggtcatggtgggagaggctttcctttgctgtttggcggtattcaatagctggcgcgcggccttgcacattatgaagtgtgtgccggacggtatatgtcaatgagtctgcgctcgcatgcggagtgcgtgcaacagttcgctatgagttcacctgcgattcgctgaacgcgcatagttcggtaacgcgatttcgctatatctggtcgtaataccgatgaggctaggaaaaggaatgattatgcagtcagataacagccatcatgaagcacatcagaacgacctgaactacagcagtgagtaccagtacgatatgtatatgtatgccgagtacggcatcgagtggtgattgagagccccgagtgagaattggactcacgacctcttccttaccaaggaagtgctctaccactgagctatcggggcgataatgtgcgcacggcttagggccgttgaacggcttgcacaacaatacacgcaatcgcgtattacgcaaatcgacgggtgtgcgaggaagtattcgggtgctctaagttgtacacatgagcgcaatattggctattttgcgctcatgtggcattcggatgtgccacgtaatcgcattttcgtgtttttatgcgctgttgtggcacgaaaattgtgggaattcggtcgtctcggaatatgtgccatgccacgccactgcaaaaacagtgaatgtgcacgattgtgcacatatttggaccgctgcgtatatgcatgtgggtgcggataacaaaagggttttgacaaaagccaaaaccctgatggcggaggatacgagattcgaactcgtgaggctgttacaccaacacgctttccaagcgtgcgccatagaccactaggcgaatcctccatgcactgcagtgcttgctagaagtaagctccgtaggcaactcgaataagctaccacagctttcggataaatgcacattcagtgccggctgcggcgtgtcgctttgtggacaaggaccaccaatgagtgcctgcgctgatgtgcaggtcgttcgtacggcgtgtgcaacaggtgatctcaccgggggatgaaccagtgcaaatcaaagcgactcaaggcaagtcagcaaacccgaggcaaaccagaatgaacatgcgcatgccatcgcgtgaattattgccagcctcttgccgtgatgcaacatagtgattttaggctatgaaccttggtgaaacagttggtcatgcaatatgagggatggggagtggccagtcgcggggagttcataattcgggaagtctcccatctgtgagcgggacaatatcgaatattgagacaatctgcggtaataattgatcgaaaaacagtgcctaatacctcttaaatcctaaaaaatcaagactgttcctcaaaaaagtttttctttatattgagtagttggtttttgattacttagccgcgcagagagagggataggcatggttcgtcgcgcccaggctgctcttcggtccgttgaacacaccagcgtgaggcagctgcgagttctggctgcgattgtatttctgttcgccatggtcatcgccactgtggctcctgcagtcacggctccgatggccttcgccgacagcagcaccagctcgtccagcgttgactacgccacctgggccgaagtctccaaggcgatggacaagcagctgaacagcggtcttaagacgtacaaggatggcaacaccgctggcgccacctccgatttcatgggcgcgtacaacaagatttacgtggcctccaacttcaccgcggtcgtgcacgacaccattggcgcggacaagcagctcgcccaacagcaggcattccaaagcgttcagaatctttcctacacgcctggcaacgacgatcaactggctcagcagattgatgcgttgaccgccgatcttgacgccacggcccagcagctcgactccaacgccgatctcgccaagccgaaggcgtacgccgaagcgctgcaggcgcagctggccaaagagcgcaaggagctcgacgccaagaaaaagaagaacccgggcaagggcaatcgttcatggaccgacgtggccaacgaaatgaccccgattctcgacaatgcatacaaagcttacgaaaagggtaatggtgccaagggcgccacgctcgtgaacaacgcgtactaccagtattacgagaagctcggcttcgaaaagaacgtgatgaacgccatcagcggcaaccgcgtctcgcaggtggaataccagttcaagatgtgccgcaagtccatgaacaccggcgtatccctgaaagacaccaagaagctgatcgacgacctcaaggccatgctgatcaaggacgccggcattcttgacggtggtgccgccgataaggaagacggtttcaccaagctggtcaccagctcctccggccaggcgttcctcgtgcttatccgtgagggtcttgaagctctgctggtggttgcagccatcgtcgcctacttggtcaagtccgataacaagcgcttcgtcaagtggatttacttgggtgtgctcgtcggtctgctcggcgccggcttggtggctgtgatcttcgtgttcgccttcggcggctccggcccgattcaggagatcatggaaggcacctgcgcactgatcgccatgggcatgctgctgtggacgagtaactggatgctgaacaagtccagcgtggaagcgtggaaccgttacattcgcaagaagaccgaggctgctgtggctgatgccgcagccgccgcaagtgccgacaacgtgacgctgaaaaccgtggtctcgctggctatgctgagcttcctcgccgtgttccgtgaaggcgctgaaaccgtgatcttctacgagtccatctacacgatgagccgcgatactcgcggtatgtggatcggtggtctgaccgccgcggtggtgcttgtcggcatcttcctgctcttccgcttcacctccgtgaagattccgattggtccgttcttcctggtcacttcgattctgatgtctgtgctggtggtggtgttcgccggcggcggcgtccactcgctgatcgagggcgacttgctgcccgccttctacctgaacggtgtgccgacgaacgattggcttggcctctacccgtacgtcgaatgcctagtggcgcaggccatcgcagccgttgcggttatcgcgctgttcgtggtcggcttcatcaagcagcgcaagctgaaggcgcaggctgctgccgaggtcccggccgtgaaggcgtagcccgtctagctcgtccgtttcctcccataactgcagacaactgacagacttgcggcacggcctcggatcgatgccaattcctccagcccacgccgcacttatctcataactgaataattgcaattatctaagcgtgaatcctaattcaccagagatagagaaaaggaataacaatgatgaagaacaagaaactggccgctctgctcggcctgctgctcgccggttccatgaccgtgtccatggctgcctgcggttccaccaactccgcatccgacactaaggctgactcctcctcccagtcctccgactcctcttcctccgattcttcctccgattccggcgccggtttcgaagaggttccggttggtccgtccggtactgctgaagagcaggatcaggacgccggcccgctgaccgtgggtgctgtgtacttccagccgatcgatatggagccgtcttccatgggcctgaaggctgctgacgcttccttccacctcgaggccgacatccacgccaaccagaagggcaccgagctcggctacggcaagggcgacttcgtgccggatctgaccgtgaactacaccatcatcgataagtccaccggcaaggaagtcgagggcggcaccgccacctccggtaccttcatgcagatgaacgcttccgatggcccgcactacggcgccaacgtcaagctcgacaaggctggcacctaccagctgaagctctccatcgaatccccggcctccaagggttggatgctgcacgttgacccggagaccggcgtcaagggccacttctggaccgagccgatcgaggtcaccttcgacaactgggattacactcctcgccagtggtgattgactaagcagaaagccccctcgtcagagggggctttacgccgctttagggagataattcttaggacggtctaaaactcccctcagtccgcttcgcggacagctcccctcagagaggggagcctaaggtgaacagagaaaggacgcgaatgcttgaacaattcgtggcagtgatgccgggcactttggcccccgcattgctggtgatgagcctgagcgtgatgctcacggtcggcgaggggcgagataagccgataagctcgcattggcgtctcatcggcctgatcgtcggtctgatcgccgccatcgtattcgccggcctgcgcgcctcggccgtgatcaatcagcgcacgttcgtcaactacccggtgttgtggtgcgcgatcattgccgacatcctgaccatcgtcgtggtggtgttcgcacgccgcatcaccaccaattggcagcagcacaaggtgttcatgcacatcgctaacgccgtggccgccatcgacatcgcactcaccctgttctacgcgctgccggacgtgattctgcagctcaccatctgggtggaaccaggggagaccgcattcacttcggccatgctgctgcgcgctcttggtttcctgcttggcgtggccatgtccattattgtggccgccatcttccgcacgatgcgcaccactgccgtgcgctgggcgttcaccgtggccgtcgcggccatgatggtgattctgctgattcaacacttcactggtcttgcccagattctgcaggcgcgaggcttcccgatgaaccatacgatgttcgtggcgctggcttggtccatcaaccagaactccacgatgattatggcgcaggcgctggtgttcctgattcccgccgtggcctccatcgtggccggtttccgtatgaaaacccatgatgtgtcgggagccaacgaggccacgttgcgccggcataaggcattccgccaccacgccatcgccgctgccgtgtggagccttatcgcagccatcggcgtcaccgcaaccctgaccgtgggcgtcgccgcgacccatcagaccatcactctttccccgccggaagcctactcgctcaaggacggcgtggccaccatccccttcagccaggtcgaggacggccacctgcaccgcttcgaatacaaggccgaggatggcaccgtcatgcgcttcatcatcatccgaaagaacggtggcgcgtacggcatcggcctggacgcctgcgagaactgcggcgacgccggctactacgagaaggacggcaagatcatctgcaagaagtgcgaggtggccatcaacctggcgaccatcggcttcaagggtggctgcaacccgataccattcccgtacaagaccggccacggcaagatcaccattcaaactacggatctggacgtgctgagcgcccacttccagtgagtcaggcaggagacaagaatcgtgttctttctgcgtatgattactcgttcgttcacccgacagctgcgccggcgcctgcttatcgcgctgaccgtatgcctgtcggcgaccgtgtccgtatcgatgctgggcgtcgtgttcgacgtgggcgacaagctcaacgccgagctgtccacctacggttcgaacatcaccgtgcagcctaaggcggacgcggtcgtttccgacctgtacaacaccgagtcgggcggcgcgacgtccaccagcgacccgaccgcttttctgaaggagtcggacgcggccaagatcaagacgatcttctggtcgttcaacatcaccagcttcgcgccgcagctcaacatccacgccacggtgaacggtaccaacgtgccggtcgtcggcacgtggttcaacaagaacctcaagatctccaccggcgagactaccgtcgtgggcgtggaaggcatgcgctcgtggtggcagctggacggcaagtggcccaaagacgattccgaccagggcgtgatcggcaagacgctggcctccgaactcggcgtgaccaccggcgacaccatcaccctcaacaaaaccaccgcctcaggcaagaagaacgagcagaaaatcaagctcaccggtgtctacgattccggcgacgaggacaacggctcgctctacatcgcctcctccacggcccaggtactcgccgacctgcccgattcggtcgacaaaatcgaggtcaaggccctgaccacgccggagaacgacctggcccgtaaggccgccgcgaacccggccgcgctgagccaggaggaatgggagacctggtactgcaccgcctacccgagctcgatcgcctatcagatcgaagaggtgattccgggcgcggtggccaagcaggtgcgtcaggtggccgcgttgcagggcaatgtgctgcaaaagacgcaggccgtgatgattctgatgaccgtgctgagcctgatcgccgcagccgtggccgtggccaacctgatggtcgcctcgatcggcgaacggtcgggcgagctggcgttgctcaaggcgctcggtgccaccgatgccgcggtatcccgcctgatgctggccgaaacggcggcaatctcgctgctgggcgcgattgtgggcgcgctgctcggttccggcgtggcccagctgataggccgggtggtgttcggttccggcattacgatgcggccgatggtgttcgtgctggtgttcgtgctgctggctgtcaccgtgctgctggcgtccgcctcatcgattcgttcgattctgaatctcaagcccgcggaggtgctccatggtcgctgagtttatctacgtaggtgtggaaggagggaaccgatgaccaacaccggtatgttcttcagaatgctgttcagcgccgtgttccgtcggcgttcgcgcgcggtgatggctgtggtggcgtcgctggtcggcgcggccacactgttctgtctggcgatgatctgcctcgctgtgccgcagcagatgaacgaggagatgcgtgcgtacggcgcgaacctgattgtcacgcccaccgaatcgaccaatgctgacggcaaggccggcatcgacaaggcgatggtgcagcacaccactgaaatggtcaaggccaagggttccgcgaaatacgccacctaccgctacgagaacgtgcgcgtcaacgcctcgccgtacgtgatggccggcgtgaatgcggcgcaggtcaagaacctcaaccatcactgggtggtcgacggctcgtggccgaccgacggcaaggtgctggtcggacgcgacatcgccgacgccatcggcctgagaatcggctccgccatcaccatcggctaccgtgcatccgataacgctagcaccaacggcacttcgtcgaactcctcgatcgaccagaaaaccaaagacggccgtgtctccagtgacatcatggacacctccggtaccgaattccgcgtggccggcatcgtggacaccggcggcagcgaagactcgatcatctacgccaccaacgccgacgtcaacaagctcaccggcatcacgcgcggcgtggacgtcatcgagtattcggccggcgccagcgacctcgcaggcctggtgtccagcatcaacgacatgacctccatgcacgtcaaggcacagcaggtcaccaagatcaccgcctccgacacccgcatcatcaccatgctgcagacgctgttctggatcgtctcgctggtggtgctggtgctgacgctcgtcggcgtcggcaccacaatcagctcgatcgtctcgcagcgacgcaacgagattggcctgcgcaaggccctcggtgccagctcgcgtgccatcggcaccgagttctacatcgaatcgtcgctctacggcctgattggcggcctcatcggcaccgcaatcggctacggactcgccagttggctgtgcgtggcggtgttcgaacgctccatcgtattcaactggtggctggcgctgatttccgtgctgttcagcgcactggtcgccatcgtcgcctccatcccgcccgtccaccgcgccacccgcatcgaccccgccgtcgtgcttcgcgaagaataaagaaagagaaacgtcatgctacttgaactcgaccacatctcgaagatctacggcgacctgcgtgccgtggacgacctcaatctgaccgtgccggaaggcgaatggctcgccatcgtcggctcctccggctcaggcaagaccacgctgatgaacatgattggctgcatggacacgccctccaagggctccgtgaagctggaaggccgcaagctggaggacctgaacgccacgcagctggccgacgtgcgcaagaacctcatcggactggtgttccagaagttctatctggtgccgcacctgaccgccgtggaaaacgtgatggtggcccagtactaccattcggtggtcgatgagaagcaggccatggaggcgctggaaaaggtcggtctgaaggaccgcgcccaccacctgcccggccagctctccggcggcgagcagcagcgcgtgtgcgtggcccgcgcgctgatcaacgacccgaagctgattctggccgatgagcccaccggcaacctcgacgagaagaacgagaaaatcgtgctcgacctgttccgcaagctgcacgagcagggcaccacgattatcgtggtcacccacgatgcgctggtcgccagctgcgcgcagcgcgagatcatgctcaaccatggcgtgctcgtcggtgagaagtggaatgacgaggatgcgcgcaaggcctacgaggcggccggcggcaagcccgcctccacgggtgcacaggtcgagggcgcgcagaacggcgagaccgccattggtttcactgaccccaccaaggccgcgaaaaccggcggcgaggagtagggccgtcaggggcatcgagcagtatgtgaggaatacatggcaagctgatggtctctcccccagtcagcttcgctgacagcccccctcgtcagaggggggcttaaggagcgtgaatatgaccgaaaagaatacgttgaagaaatccgcgacattggcggcggccggactggtcgtggctggcgcgctgctggccgggtgcggcgaatccaaggccacgccgatggacgatgcgtacgccggcaactcgggcgagaccgagaagtcgcaggaagagcagtcgcaatcccagtcaaacggctccgatagctccgacggctccgattccggctcatcgcacaacgacccgtccaccaccacgtccgacaagaaggacaccggcaactacaaggacggcaactactcgatcaacggccagtacggcccggtaggcgaggattccatcgacgtccatctgaccatcaaggacggcaacgtcgagaccgtcaatatcattgggcacccgttcaccacgatttccaagaaccatcaggacgacttcgccaaagccattaacggcgtggtggacggcaaacctctgaagggtctcaaagtggacaaggtcgccggcgccagctggacctccgacgccttcaacaaagccctcgaagtcgcccgccaggaggcttcgattcaggagtaagaccgctacttcagcaatgctggccacagcagatcggccatgcgcgaggcccaggcggtgtcgtcgtccattgctttgccctcgatggcctcatacgccaccaaagatccgataatcgtggacaacagcaacttctcgtcaacgtcctcgcgaaacacgccctgcgcgactccccgcttgaggaacgcccccacatgctccagccacggggtcaccacctggtcgacgatgtgctggaagaacttggcctcgctggacaacacaatgcccacgcgcttgacgtcgatgtcgttgtcgcgcacccaatcgaccaatcgctgcaatagttgcgtgaaatgctcacgcgtggggctgggcactgggtcgggatccgggatggccagatacatcgcgctgatctcgtgcagcagctcgtcggcattatgatatcggcggtaaatcgtggttttggccacacctgagcgccgggccacctcctcgatggtcacgccgctgatgccgcggtccaccgcaatctgcagcgtggctcgcatgagcttgcgatccgtcgcctcgcgcgtgcgctcaccgcgcggtgtcgccgtcgtatctgtcatctccgtcatctcttctcttcgaaatatgctcccgtacgctcccgctggcgagagctggctggcaaagccagactgagggtggtaagtccatgccgtttgtaggcaactcccggataatacctgctagctcagcactttagtgctctcgacttgggctacataccactggttgaaccgcaccagtggcttcctgagcaacagcccaagcaacagtagcggcggcacgaatgccagcagcattccggcggcccgccagtaatccatgtcgtagatgccggcgatggccgcacgcatcatcgtcaccgcatgggtgagcggcaagaacggactgactttggcgatgaagtcgggcaacatctgcaccgggtaggcagcgttcgcacccgaaatctgcacgatgagcataagcacgccgattgccttacccacattgccgaaactcaccaccatcgtataggtgaagaacgagaacaccagcgaggccagccatccagacaacataaacagcagcggatgcacggcctgcacgcgcaggaacagcagatcgccaccgagcgacaccgtggattgcagcagcgcaatcagcgcgaacaccccgtaatgtccaaggaagagccgatgcggccgcggatcgcccaatgctttgcgcgtccggcgagacacggtggttttcagcgtcaccaccatcagcagcgcgcccacccacagcggcagcagcgtgtagaacggtgccatcgacgaaccgaaattcgccaccgggaatacggccttgcgcctgagctgcaccggtgcggccaacgtactggccagcgtttcgggatcattgcccagcacctctttgaccatgcccatatcgccactgtttagtgcgtcgctcagtgtgctgttgaacgaagccagttcggcaccggcggaacgcagtttgccggacaccttgtccaaggtagtgcgagcgtcgctgagcatatcgctggcgtcgtcggaagtccccttcaggtcgccgagcgtggagtccaactgggtggcgccggaactcagtatgccggaggcgtcagcgacggtggacgacagggagtcgatttgcggtttcaccgtggccgagaaatctgacttgatattggcaatactgttctgcgcttgatcagccagattcttgacctgcgcatgctgatcctgcgcgtcctgattgccttggcgaatatcggtcgccgccgtattcagcgcttgccgcagcctgttttgccgtgcgattgaacggtcaatcgccgtgatgatggatgagtcgttgcccagtatgccggccaacgtgttgcgaatttcagtgtatttctccgtctgcttgccaatggccgtggcttgacggtccaattcgtcggcgaccgtggtggcaccatcattcgcgtcggaatacagcttgtctatggaatcggacaccgcgccgaaactggaggcgctcgcgtccagtgcgctgctcatcgcgtcagcggtggtgcccagggctccggccacgtcggtgacttcctgtttggcgctggcaagatccttgccgccttgtttggcggcagaggaaacctgagtgatcagtgagttcgaggtgtcgagcaaggcgccggccgtatcggtcaatgcgctgtatgtgccaagcagatccgcagtatcgtcaagctgtgtggcgaaattggcgatgttggcgttgaaggtattcagttgctctttggcctcgggcttggacagctgatcggccagcgaagacgcgatttccagcccggccgaagtgatggtcttagcgaacgtggtgttgatttccgccgcaacctcatccgtgccctcgttgagcagattcggtgccagcgcgttcttcttctcgttgcggtaataggtcagttcggcatgctgcacgtcgtcggagaagaaggtcatcatgtctttgctgaacgacttcggaattacgatggccgcgtagtatttgccggatcgtgcgccctcgacggcatcggctttggacgtgatcgtccaatcgagctgactgttggcgcgcagcgcgttcaccacctgatcgccgaccgtgactttcaccgggatcaggtcggaacgatacccctcatccacattcgccaccgcgaatttcaggttcttcatattcgagaacgggtcccagcatgcggccacgttgaaccaggtgaacaggccgggaatcatcaccaagccgatcacgatgatgatggagaccacgttgctggtcaggcgtttgatgtcgccggtaaacagtttccacatggtgttcatcgtgcgtgcctgccttccttggtcggcggaatagtggggatgattgcggtaacggcggcgctcgggtccgcttcttcgtggcgttcggcggaggtgtcgcgacgcttggccttatgcccgtacagcatggcgcggatcgactcgtcggagaggctgccgagctcggtttggcggcggatggaatcgcgcatgaattccacgaccatcaggaagcccatgatgatgagcacccatgccagccatgtgcccatgactacgattttctcgctggtggtcagcgcaaacacgataatgagcgcggccggcaccacgaatccggcaataagcgcacccagcagcagccggggataacggtaggcgaatttggcggcccgacgttcgatggcatgacggtattcgtcgtggtcggccagtgctgcaatggcctgagtgacacggtattcgctgccgggcagatgcaccggctcgccgataatcatgtcgctttccttgatttcccgcgcgaacaggcggttgagattggccagtttcggccgggcgccgaggccaagcgcaaaggccagaaccacgaaaaccagcaatttgccgatataggcgaaccagaggccgtcgtagaagccgccgatggtttcacgcatcgcgtcaatcgaataggtgaacggcagcagcgggtagatggcgcggaagaacgcgggcatcatttcaatcgggtacaggccggaggcgcccggcacctgcagaatgaccagcgccacgcatacgcctttgcccacgtgcatgaacgtggtggagagggcgaaaatcaccgacatatacaccagtgaggtgatgacgcaggtgagcagaaacactgaggcgctcgcgcattgaatgccgatgacaagatcgccgatggccgtgaccaggccttggacggcagccagcgtggccagtagcaggaagcgaccgagatagccttgggttggtgtgagatcgtcgatgccctcatcatcggtttcgagtttgggaatgaccacgagcacgaacgcgcccacccacaaagacagggtggtgaacagcggtgccatgccggaaccataggaggcgaccggatagacggcctgttcgctgataacagtgggggagagcatgaagtcggcgattgtggcggcatccagtttgccgtcggtgccgatcagggaactgagtgaactggagatgctcagggctttgatgtcggtgaccagcgtatcgagcttggtttgtacgccggccagcgccttatcggtgtcgcgcagcgcggtcaccgtggtggaggctgctttgtcgagttggtcgagggtatgcttcgactgatcgatgagtgagccttgcgacgtgatgccggtcgacagagtgctggcggtcgagctgagggcgttgagaccggtgttgagctgaggaatggcgccggaggtgatggtgccgcgagcggtattggcctcgcgcaccgtggtttgggtggcggtattgagatgctgcgccaatccggcggtgtctgtggaggcattgccgatagtggtgttcaggctatcgaggttgcccagtgcgccggcaagctcgctattgcggctttccagtgtggcaatggcggattgcagcggttctcgattggcgttcggcagccctttgagttggtcgatgatgtcggcgttcgcttggttgatgtcttccgccgtattgatcagttcgcctacctgctgattggcggcgctgatggttccggttaccgtgcccacgctttggttggcctgtgctgcggcttggctcagcaggcttgagccttggtcaagcgcttcggacgtggaggtgacgaagccgttcagactggtctgggtagtgccgatcagggtggagacgccggccagaccttctgcagtgtcgatgccaagtgtgcgcgcgtcgtccagcgcctgacgtgcggtgcgtgtctgctctggggtgtcggtgagtttggtggtgagcttggcgatggtgctgcgtgtgtgctgcacatcgtcggaggccttggcaagggccgtgagggccttggctttggtggtgtcttcggtactgatggctttgccgtcaaccgtattgatgacttcggtaagtacttcggatacggtggagacgaatgtggaattgaccgtgcggtccacagtggacgcgccgacgtcggtgactttgggggcgatggcgctggctttttcgttgacgtaatactccagagtgggccgactcttgccgccggtcaccacgccggcgagatcgtcggaaaagtctttgggaatgatgatggctgcgtatgccttgccggattccacttggtccatggcctcggcttcggtgacgaaggtccagccgagctggtcgttgcttctcatctgcttgacgatttgatcgccgaggttctgcttgccgatgagcgcgttgtcggtgccgtcgtcattgttggcgatggcgacggtgatgcctttggtattgccgtacgggtcccagaagccgacgatgttgtaccacgaatacagtggcgggatgaacaccatgccgaacaggatcacccatgcggccggcaccttgaacaggcgcaggaagtcgcgtctgaggaccttgaagatattgcccactgatacctccggagcttggtgttgcttggttgctacgttttccgtagcgatacgttaatcgtagcgctacgtttgtagtagcgtaatacggctgccggagattaatggggtgattgatgatgtttttggcggaataacgccgctgcccagcggcttatcgtgtgtcgctgggcagagcgaaaggcgttctggaacttattgacaagatttctggatggtttttggacgtttcctgaacgcgatggataggctcggtgctcggcaatgtagacagacatgtaccgaccgcccatcaagttcagcaaaaccgcaatcgggtgatagggtgaggggacgctatgtggggaggaaaccatggttgaattcaaggacgatggcacggccactaccctcggcaagccgcgggagaaccgtgacgccgagtccgcagtcgtggccgatctggtggccgtcgaactggacgaagccggcttgaacctgaacaccaagcgattaccgattctggcgcgcatctatggcgcggtcgtgctgctggacggactcgccacattgccgattatggtgatttccatcctctatgccgtgcgcgagattctggatggtcatgtgcacgtcgatgcgatgagcctgaccttcatcctgtccgcgattcatgcggtggtgctggtagtcagtgccgcatgcctgattgtgttcggcgtgatgctgctgcgcaatcatcgccggtatgccgcgcgctggacctacgtgctgatgccgttgacgttggccgacggcatgctgtcgctggccctgaccggccttggcttcaacctgctgctgccgctgattcagatgattattctcgtcgtgatttcggtgaccgccgatccctccctgagcgaggaacgccgtctgcagcgcgcgctcaggcgtatggacgatcgcgatgattatgaatcggctgtggcggccggcatgctaggccgcgaccagtccggcaagggctatattgcgctggacttcttcaatatcttctggctgtttaccatcgcttcggtgggtggcctgattgtggagacgatctaccatatggcgctgtataacggtgaacttcaggaccgcgctggtttgctgtggggcccgttctcgccgatttacggctgtggtgcggtattggtaaccgtgtgcctgaatcgcctgtggaaggcgaatccgttcttgattttctgcgcttcggcggtgatcggcggcgcgttcgaatattgcaccagctggttcatggaagcggcgtttggtattaccgcgtgggattacaccggccgttggctgtccatcgacggacgtacttcgggccaattcatgttcttctggggactgattggtgtggtgtgggtcaagtggctgttaccgcgactgctggctctgattaatcgcattccatggaaagtgcggtattcgctgactgcggtatgcacggtgctgatggtgattgacattgccttcacgctgatggccttggattgctggtatgggcgcatggccggccagccgcaggattcaccggtcgcgatgtggttcagcgaacgctacagcgacgcttacatggccaatcgcttccagaccatgcatatcgacccttccaaggccgggcgtatgtgaatggccggcaagtaattacgcttcgcgggcagaaggtgcgtagaacctaagacagccctcgcgtgtgggtggtaagcgggatacactttcaagcgttgaaggaatgattccctccgctgatgcgctgttttgtgacgcgcgtgatgacgatgggacaatcaaacgaaaggcaaggcacatggccgaagctacagcaaacattggtgtgattggactggccacgatgggctccaatctggcgcgtaatctggcgcaccatggcaacacggtggcgttgttcaaccgccactactcgcgtaccgagaagctcatgaacgagcatggcaccgaaggcaacttcgtgccggccgaaacgctcgaggaattcgccgcgtccctgaagcgtccgcgtaccgccatcatcatggtcaaggccggtgctccgaccgacgcgaccatcgcgcagctggaagaggtgttcgaaccgggcgacatcatcgtcgacggtggcaactccttcttcaaggacaccatcaagcgtgagaaggaagtacgtgccaagggcttccacttcgtgggttgcggcgtgtccggtggtgaggaaggcgcgctcaacggcccgtctctgatgcctggtggcactgcggaatcctggaagaccttgggcccgattcttcagtccatcgccgccaaggtgaatggcgaaccgtgcgtgacccacatcggcaccgatggtgccggccactttgtcaagatggtgcacaacggcatcgagtatgccgatatgcaggtgattggtgaggcgtatgacattctgcgccgtggactcggcatggatgccgaggagattggcgacgtgttcgctgaatggaacaagggcgatcttgattcctacctgatcgagatcaccgctgagattctgcaccacaaggatgccgaaaccggcaagccgttcgtggacgtggtcgtggatcacgccggcatgaagggtactggtacttggaccgtgcaggctggtctggaatttggttctcctgtggctgccatcggtgaagccgtgttcgctcgtgcactgtcttcgcacggtgagctgcgtgaagacgctcagaaggaaggtctggctggaccgaacaagaccatcgatctggccggagaagacaaggccgcgttcgtcgaggacgtgcgcaaggccctgttcgcttccaaggtcgtggcctatgctcagggcctgaacgagattcaggacggtgccaaggaatacggctgggatatcaatctgtccgaagtggcccgcatttggcgcggcggctgcattattcgcgcccagttcctgctcgaccgcatcaccgaggccttcaggggcgataacccgccggcttccctgctgttcgatccgtacttcgagaagatcatcggcgaatcgcaggatgcatggcgtcgcgtgatcgttcgcgcggtggaggccggcatcccgaccccggtgttctccagctccctggcgtactacgatggtctgcgctccaagcgcctgcccaccgctctgacccagtcccagcgtgacttcttcggtgcccacacctacggccgcgtagacaagcccggcgtgttccacacgctgtgggctgaagaaggcaagcctgaaatcgaggcgtagcctcgtgatttcaggtttaggacagccctgtgggctgtccggccttcttcaggctcggcgatagccgagctgagaaaacagcaagcccgagatcgaggcgtagccatagacgaattaagccccctcatcagagggggcttaattcactcacaactcggtgacggtttcttcggtggagaaccagatgaactcgtccactccgttggcgtaggaggacgggtaatccgggttgttgggctgctcgaagacatgggccagcgattcggctttgccggcaccggcggcgaagaaccacgtatggcgtgaacgcgcgatgagcggagcggtcaatgaaacacgcagcggcggcatcttgggggagtggttcacacccacggtgagcctatcggtaaccttgacctcatcatgaccagggaacagcgacgcatagtgaccgtccggtcccatgccgagaatcatcagatcgattaccggttccggtcccaattcattcaccaactcgcgctcatagtcgctcgcgacatcgtccagcaacgcatcattcgtggcatcggcggcggcgcgaacggaagcatcatcgctgtcggcctgatccatcacatcggcgatgtcgtcggctgaacgggtatcggccgccatctcatgaatattcgattcaggcagcttgccatctgccaccagctggtcaagcagcaggcgacgggcctccagagcattgcgatcggtgtcgtaagccggcacaaaacgttcgtcgctccaccagaaatgcacgcgtgaccaatcaatcgcatcagccagcggatcgctcagcaccaagcccaacggctgcgcggccgaacctccagacagcgccacatccacacgcgtgcgatgcgtgccatcaggcaatcgttcggcgagcaaatcgagtagcgccaagacaaaacgttgcgtgccagcctgaatcatcagatctttattcggatacacaatgagttttcgagttgccatgtatggtccttgtatggggtatgtgtcgtactttgcaatgtggattgtgttgtcagttgacaacgcataatacgggtggcatgccgggaatctagccatttgcagcaatgaaatgtgttgtcagttgacaacacaatgtacattgtgcgacatcacatatgtcactttattactccgcgggcatgagcttcggcatcgcatgaggtaggaaacgatgagcaacggcgttggcatggctcggccacaattgccgaactcatgccaacgccgctgtggcaacgggttctaccgacttcagtgacgaatcagatcccagccttcgttgatgacctcggcgtagatttcatcgggatcgatgcgacgcagttcctcggtcaggcagtcctcgatggtgcgcatcggcacggacacttcctgcggagtctggccgggcagcgagatcagcgcttggtcctcatacgggcgttccagcgagatcacaccgtcctcacgggtcaggtacacgccggtcacggcctgcgcgtcgggcacgaactcagtttcgactggtacgccaagtttcagacgcagccatgcgcacagcatttccataggcaggaagtcggccttgccggtcaccttcgcggcggtgatgggcaggtgcggcggctgatcgagcatcgaggcgagcattgcgcgccagacggtcagtcgtgtccaggacaagtcgatatcttccggtgtccaattgcggcgcaaacgctcaatcgtggcctccggattattggagtgcaacgcgtcggtgatgcgactgcgggccatcgcacccatcagatccttggccgggttcgacggcggtgtggtcggccaccacgccactacaggcgcatccggcacaagcagcgggataaccagcgtatccgggtggttgataaggccaccgcgcggacgcaagatgatgatctcaccggcaccggcgtccgcgccgaatcgcacttgggcgttcaggttggaatcgttcggatcgttcgggccgtcggtcaaatcgacggccggattatcgcgactcgcgctcacctcggcggccacttcggccgcgttcggttcgccttcgccggactgatcggcaggattggtatccggtactacggcaatcacgcggcacgggtgctcacggctggccgagttcgcgatttccagcgcatgctctaggtccgcgtcctcggtggcgatgagcagcgtcagcacgcggccggtcgccgattcgccgcgctcctcgtgcagctgttcgattttgtgcgcaatctcgcgggtgcgggtgttcggcatatcgatgatcatggcatcctccagtggcggccgtcgcgcgccagcatttcgtcggcctgtgccggaccccacgtaccggcgcggtaggcctgcggctggccaagcgtggaccagaattgttcaatcggatcgaggatctcccagctgaggttcacctcttcggtggtcgggaacaacggcggatcaccgagcagcacgtccagaatcagtcgctcataggcttccggcgagttctcggtgaaggagcggccgtagctgaagtccatgttcacgtcacggacctccatggtggagccgcccggcaccttggctccgaagcgcatggtgacgccctcgtcgggctgcacgcgaatcacgatggcgttcttgccgagttcgcgcacggcggtctgctcgaacggcagatgcggggcgcgcttgaacaccacggcgatttcggttacacgcttgccgaggcgcttgccgcaacgcaggtagaacggcacgccagcccagcggcgggtgtcgatatcgaggcggatggcggcgtacgtttcagtggtgctcttggggtcgatgcctttttcctccaagtagccgaccacttcgtgcgagccctgccagcccttggcgtactggccgcgcgcggtgttggcagcaaggtccttgggcaggcgcacggcggaaagcaccttggtcttttcggcggtcaggtccttggcggtgaagctcaccggctcctccatggcggtcagagccatgagctgaagcaggtggttctggatgacgtcgcgtgcggcgccgatgccgtcgtaatagccggcgcggccgccgatgccgatgtcctcggccatcgtgatctgcacgtggtccacatagttggcgttccagatcggctcgtacatggcgttggcgaaacgcagggccagcaggttctgcacggtttccttgccgaggtagtggtcgatgcggaacacggagctcgggtcgaacacttcggataccacgctgtcgagttccttggcgctggccagatcatgaccgaacggcttctcgatgatcacgcggcgccatgcgccctcggacgagcgcgacaggccggaggcggccaactgcttggcgacctgtgggaatgcgcgcggcggcaccgacatgtagaaggcatggttaccctgcgtgccgcggtcgcggtcaagctcctgcacggtggcgctcagacgctcgaaggcctccgggtcgtcgaacgtaccctgcacgaagcggatgccggcggccagattgcgccaagtcgactccttgaacggcgtacggcaatgcgcctggacggcggccttgacgaattcgatgaaccgttcctgtgtccagtcgcggcgggcgaagccggtcagaccgaagctcggcggcagtaggccacggttcgccaggtcgtagacggccggcagtagtttcttttgtgccagatcgcccgtgacaccgaaaatgacgaggctgcatgggccggcgatacggggcagtctgaggtcgcgcgagtcgcgcaggggattgctccaattgggggattcactcataatgtacaagggtagtcgccggcggctatctatcgctagaggcgatatgcgatttgggctgcgatttgggccacattgtgtgtgctgtgccgtgcgttgggccaatcgcgtacgcaaacgtatacgcaacgccgtagttgaaatatcccaaaacggtgtgtattttagaagagttgcccctttagctcaacggttagagcagcgtccttttaagtcgtgggttgtgggttcgaatcccacagggggcacaacaaatccttggaatcgcaatggttccaaggatttttttgtttcgaccagcctggctcctagagtggtgtcccatgtcatgcaccacgattcttgtcggcaaaaatgccagttacgacggttccaccatcatcgcccgcgatgacgattcgggctcgggccgttacgatcccaagcgcttcgtcgctgtcgcccccgacgaccagccgcgccactaccgcagcgtgctgagccatgtcgaaatcgaactaccggacaatccttgccggtacaccatcgcaccgaacgtgctgaataatcgtggcattctggccgaagccggtgccaacgaacacaacgtggcgatgagcgccaccgaaaccatcgctgtcaacgagcgcgtgctcggtgcggacccgatggtcgagttgcggccggctgtcggcgaaccggacagcaacgattatcaggccgagcagcccggcggtatcggtgaggaagacatcatcacccttgtgctgccgtacgtcaccaccgcgcgcgagggcgtcgcgcggttgggcgaactgctcgaaacctacggcacctacgaatcgaacggcgtgattatttcggatgtggacgagatctggtacgtcgagaccatcggcggccaccattggatcgcccgccgagtgcccgacgactgctatgccacgatccccaaccagctcggcatcgacgacttcgacctcgccgatgcgttcggcgagcagcgcgaatacctatgcagcgccgacctgcgcgagttcatggccacgcatcacctcgaccgcacaatgggaacgccggtctcttccaacggccgtcacgcgcatagcgccggattcggaacaaccgttgcccttcccacccgcttcaacccgcgcaaggccttcggcaccgcgacgccgaaggaccatatctacaacacgccgcgtgcctggtacatgcaacgtcgcctcaaccccagcgaggactgggattcgccggccgcccgctacacgcccgaatccgacgacatcccgtggtgccgcgtgccggaagacaaggtgagcctcgaagacgttgatttcctgctgtcctcgcacttcgaaggcacgccgtacgacccgtacggcacgaccggcacggcggaatcgcgccaccgttaccgtccgatcggcgtgaaccgcaccggccatatggtggcgattcaggtccgcccgtatgtgccggcggccaatcgcacgatgatgtgggtatcgttcggctccggtccgttcaccgccgccgcgccgttctacgcgaacgtcaacgacacgcctgcctacctgcgtgacaccacgcccgaagtctccaccggcaacctgtattggacgaaccgcctgatcgccgtcgtagccgacgcgcattggtatgagacgaaccggttcatcgagggctatgcggaaggcgtgcgcgcgttcgggcaccggctcatcgagcgtacggatgagcagtggcttgctcgaagcgatgccgaatcgacggatacgaatgcatggccgctcgatggcggccacggcgatgagaaggatgtgcagggcgtggcggatgtgctcgaagcggccaacgacgagatggccgactacctgcgcgagcatacaaccaagctgctgaacgacgtgctatacacctccagcaacctgatgcacaacagcttcgcgatgtccgaccgttgggccgagtagcaaaacctcgactggggaggtaacagggatgccctgctgataacgcgtcagcagggcaaaaccacaatccgaatcagttaaagccgacgatgcgttcggcgatgagatagccgttgcgcacgatccagcggccggttttgccgggcagattgagcgcgcgggacatcagctgcgagcgcacatccttgccgatggccggagaataggcgtcaatcgcatcccacagctcggttttcttaacgtagttggccggatcgcgcgagagaatcaggaacaccgaggtaacgcacgattcgatcgccaggaagtgaatcatgtaccggtacagcccctccggcaccgtaccgcgttcgggcgtggcctcggtcatcagccgattgacgagccgcaactggtccacacgcttaatcatcacgtcggtctgcacgctctgaccctcgcgcccgatgaagtagtggtagaacggcacatcgaggtactggatgcgcttcacccacgggaacggctggtacgagtaatagaaatcgacgtagaacgtatgctccggcagcttcagcccggaatcgcgcaccacctgcgtgcggaaggtgagcgcatgcatgatgatgtactgcgccagaccgaacttgcccaggtcatcccagccgagtacacggccggcctccattacacggcggaagttcactacggtcttgtgacgcttggccaccttgtcatacacgtaattggtcaccagcatgtcaatcggttcgtcggtgtcatgctgtgcacgcaacgtggccagaaccgtgtcgatggcctgcgggtcgacccaatcatccgcatccaccactttgacgtacatgccggtcgccgccgcgataccggtgttcaccgcgccgccgtggcccttgttctcctgatgaatcgcgcgtacggcgcccggattggtgcgttccagcttgcgcgcgtactccagcgtgccgtctttcgaaccgtcgtccacaatcagcacctcgaggtcgctgatgtcgcttgccgaaagcaacgagttcacgcaacggtcgaggtaggactccatattgtatgcggggatcacaaaggtgagcgtctttgccgtgctggccatgaaagtcttacgtcctcacatatttagtcgttatgttcagtttcctgttcaaaccgtagcacttcgtctcccgactcggcagagtgttgcgtaacctgtgcccctgaactcatgttctgcaaccctgaatcttccccggtggcgtgctcgggatccgattgggcagaactcgtctggtctgaatccgggctgccggaatcggactcgcgcttggctcggcgctcggcctccttccgcgccttggcgccctcaaagaacaactggggcttggagtcaagtcggctcaggccatgccaggccaaatccacaatgtatgcggccagctgctccttgctcacctttggccggtcggcccagtactgcccggtgaatacggtcatgcccaccagcatctgcgcgtagtacggcacgcccttggcagacagcttctgccgtttgaatgtttcggaaagaatgtcttcaacgcgtacggcgatgtctcccatcagcgagctgaatgagccggacgggtcggtgctcggcgagtcgcgtaccagtacctggaacccttcggcattctcttcgatataggtgaggagcgcaagcgccgtgcgttccacaatctggcgcgggtgcacggtcggatcgtcgagcgcggcggtcagcgtaccggtcagcgcgcgcatctcacgatccacaatgacggcatacaggccctctttgccgccgaaatgctcatacacaatcggcttggagactttggcgtgcgcggcgatttcctccacgcttaccgcttcgaagcctttggcggcgaatagcgagcgtccgacttcaatcagctgctcgcggcgctgcagcgacgtcatacgtgaagaatgtgccatgcggttcagcttaagtcgccgggtggaattgtcggcctgagactgccgaattcgtaggggattccatctgcgggctagacttgacaggtatggatatgaatactgtgctcgccgttcttggcgtgattgtggtggcggttatcgtaatcgccctgagcatctggttgggcaagtcccgcaagcgcgatttggatcgtgcgatgggcaaggttgcccccgacaacaagaagacccgcgacgccaaggccgccgccgacgctcggctggccgccgaagccgaggaagctaaggctgcgactgccgccgagccggccaagtcagccgaatcggccaaagccgagcctgcgccagccgcgcaggccgaacccgaaccggcagctgcgcccaagcccgagtcccaatctgcctccaagcccactcccgccaaacctgaaacccccgaatcggtcggctctcgactgacccgactcaaggcaaaacttgccaagtccggcaacccgttcggcaaggccctgttcgacatcctcgccaaagacaatctctccgaggccgattgggaagacgtcgaagacacactgctgcttgccgacgtcggtgcggatgcttccgcccaactggtcgatgacctgagaaccgacgcccgcatcactggtaaagccgacccagccgaagtacgcgccacgctcaaggagaagctgctcgatctggtcggtcgagatatggaccgccgcctcaatgccgaaaagccgggtgccgccaagcccagcgtcatcatcatggtcggcgtcaacggcaccggcaagaccaccacggccggcaaactggctcgactgttcgtggccgaaaacaagcaggtcatgatgggcgcggccgacaccttccgcgcggccgccgccgaccagctcgaaacctggggcgcacgcgtcaatgtgcccgtcgtccgctccgacaaggacggtgccgacccggcatccgtcgcctttgaggcatccgccaaggccaaggaagcgaacgcggacgtgctcatcatcgatactgccggccgactgcagaacaagtcgaacctgatggacgagctcggcaagattcgccgtgttaccgaaaagaacctgccggtggatgaagtgctgcttgtgctcgacgccaccaccggccaaaacggcatggcccaggccaaggtgttcgccgaagccatcggcattaccggtgtggtgctctccaagcttgacggttccgccaagggcggcatcgtgatcagcgtgcagaaggagctcggcgtgccggtcaagctcgtcggtcttggcgaaggtccggacgatttggcacctttcgatcccgaaggtttcgtggacggcattctcgcgtagacggtcgagctcttctcagtctcgctttgctcgacagctcccctcagcgaggggagccctgcgtccgtccacgttgtgggcgcgggaaatgcccgcaacgcaccaaacctagccccgaatcatattcgaaacatgattcggggctttcccatatccgttggaatcatgccggaatcagcccatccgacaccaacctaactgtcaggtgcgcttaacaatcgcgtaacttgccgtaacgaaaccaaaacgagaccggcttttactgacgaactgttagcccccacaagggggacggcattgtagagacaaagtcgacgccggccgcgcaaagcccccggtgccctgaacgaaagagagggaggtagacatgggagcgattgattccggtaacaccgcatggatcctgacatccgcgtccttggttttcctcatgacgcctggtgtggcgttcttctacggcggtatggttcgtgccaaggccgtcctgaacatgctgatgcttgaggcggccgccctgtcggtcaccatgattatctggaccctgtggggttggtcgattgcttacgccggttccgacatcggaggcatcttcggcgacccggccagcggcttcctgctgaaggactccatggtcgcccaggacggcgtgttcaccgccaccggtctgaacggcaacaactacccggtttccgtggacgttgccttccaggtcgctttcgcgatgattaccgtcggcctgatctgcggcgccattgccgagcgtgtgaagtacagcacctggatgattttcgtggcgctgtgggtcaccttcgactacgctcctatggcccacatggtctggaacggtggtctgctgtctgctgacggcgccatctccaaggccatcggcgctgccgcccacgatttcgcaggtggtactgtcgtccacatcaacgccgcagtcgccgccctgatcatcgtgctcatcatcggcaagcgtaagggcttcggcacgcagccgttccgcccgcacaacgtgccgttcgtgatgctcggcgccttcctgctgtggttcggctggttcggcttcaacgctggttccgccttcgccgccaacggtactgctggttacgcttgggtttccacctccgccgccaccgcagccgcaatgctctcttggggcttcaccgagaagattcgctccggtcactacaccgccatgggtgccgcctcgggtatggtcgccggcctggttgccatcaccccggccgccgatgtggtctccccgctgtgggccatcgtgatgggtgccatcgctggtgtcctgacctgcctggcctgcggtctcaagttcaagttcggctacgatgactccctcgacgtcgtcggcgtgcatggcgttggtggtttcaccggcaccatcctcatcggcttcttcggtgaaggcaccggtctgctggctggtggcgactggaagcagctcgtcgttcagctggtcatcgctctcgtcgccatcctctactccgcagtgatcaccgcgatcatcgccttcgctctggagaagaccatcggttggcgcgtcaccgaagctcaggaagtcggcggcatcgatcttgccgaccagggcgaacgtgcttacgattttgctggtactgccagctccgttctcaaggaggtgaagtgaaatgaagctgatcaccgctatcattcagccccataagctcgacgatgtcaaggaggccctcgcggccgccggcgtgcacggtctgaccgtgtccgaggccaacggctacggccgccagcgcggccacaccgaggtctaccgtggcgctgaatacactgtggacctgattccgaagattcgcgttgaagtgctgtccgatgacgcggatgccgaaacgctggtcggtgtgatcatcaagtccgccggcaccggcaccatcggtgacggcaaggtgtgggtcgctccgctggactccgtggcccgcgtgcgtaccggtgagaccggttccgccgcgatctgataacacagacgtccatgcttagaaggggatggactgcataggaaaggtccccgcacgccgcgaattgacgccgtgcggggactttttttagcaatgaaagatgaagcaatgacttcagcagtagatggcttgaaacaacgattcatggatatgagccagccggatgacgacggcgtctaccggaatggtgcgaccaagcgcaaagcccgcacagaactggccatgcaatgcctcactgagctgtggaatgcggcctgcaaggatgtctctttccccgtgcccgactccggcatcggcttcgccgcggtaggctcgctggcacgtggccaactgggccccagctccgacctcgacctggtcatcatctacgagcctcgcacgttgaacgaccagcagctcaacgagttggccaacaaactctggtacccgctatgggacagcggtctggacctcgaccactccatccgcacgcgcgcccaatgcgaggaagtcaccgaccatgaccttcccgccgccatgggctggctggacgtgaagcccatcgccggcgacaccgctctgatcaccaccaccgccacgtccatcctcgaacgctggcgcaaggccgcccgcaagcgcctgcccgaactgctcgactccgccaaagcccgactcgacgaattcggccggctccaatacgtcaatcagcccgacatcaaagaggcccgtggggggttgcgcgattcggtgctcgtctccgcgctcgccgcctcatggctggccgaccgcccgcacggcatctacgacgaagccgtggaacgtctgctcgacgtacgcgactgcatccatctggtggccggcaaggataccaacctgatgctgacgccctatcaggccaaagtggctgccatgcttggccttgccgatccgacttggcccgaaaacgagcgtgccgcctactcgatcgacgatttgcagacactgcttgcccgtatcggtcggcgcatctccttctcgcttgattccaccgcttcccgcgccgaacattcgctgacccacgaaaagccgcgattcgcgttcttccagatgttctctcagcgctctggtggcaagcgcgaagccccgcaattcgacgtggtggttcccggcgtggccaagcacgaaggcgaattggtgttggcgcccggtgccgagcctgccaaggacgccaagctggcgttgcgtatggccgtggcggccggcgaattcggtcttcccatcaacccgtctaccttggttaatctgaagcgctgcccgattcacgacaaccagtggaatgacgaatcgcgcgagctgtttatccgtctgcttgcgtgcggatcgaatcttatggaagtgtgggagagcatcgatttcgtggacattccgggtcgatggatgccggaatggctcggcgtccgcaaccgtccgtccgcctcggccgcccaccggtacaccatcgatcggcatatggtggaggtcacgtcgcgtctggggcgcgagacaccgtccggtggacggtacgatgacgatcatttcaaggcattgctgttggccggtatcacccacgacatcggcaagcgcgcgttcgtggccgatcacgccgccgagggtgcccgccatgtgccggtgattctcaagcgtatgggctacgcgccggacatcgtcgactgggctaccgtgctggtgcgtgagcatttgacgctatccgaatttgccacgggtaaggacccctatgatccggccgtggcggaggagttggccgaccgcttgcaccacgacaagatgctgctggatatgctgttcgacctgacccgggccgacggctcctcgctcggtgccaccgccggtgagaccatcaccaagcaatacggctggtccaagtggcgcgaacaaatcgtccgcggcatgtattccgccgcccgcgccgcgatgtaaacggaatcgcccaacgcttcgcgcggccgatacctacttcatccatgcgtccgaacgcacgcgcagcccgttggacagaccgcgcccgcccatgagcaccacgttgaacgcggcccagagcacggcggtacgcatcaggtcgctcgtcagcgccggcgtcaccatattggccagtatgagtatgagcgtcacatacaccacggcggtcagcgtgcaggtgccggccagatagcggtagtcgcgcgcgccgataagaatgccgtcgattgccatcatccagccttgcagtgggaagaagatgcccatcgtcaccatgcccacggcgatcagcgtctgaatatgtggcgtaggggagaagaagtgcccggcgaacaggccgactaccgcaaaagccgtgccgattaccgcgccggtgaccagtcccgcacgcccggtcgcccgcgtcagccgccgcgcctgctgcacgctgccagcgcccagcgctgtggccaccagcgtctggccggcgatgcccacggaatccagcatgttcatcgcaaaattccaggaggagttcacggcctgaaacccggccaacacggcagtacccatgcgcgcggcacaggcgaccgtagtcaccatggccgcacgaatcgccaatgtgcgaatgaacaatggcagtccgtcgcccccggctgccgcaataccggccaaacgaggccgcagactcgcaccatccgcccgggaccacagaatggcggggattaccaggaacagccccatgaaccactgagctaccagcgtcgccactccggagccggcaatgccccaattcagcacaataacgaacaacacatcaagcaccgtgttcaccaccgcgccgcccaccgcagcgatcagcgtgatacgaaccttctgcaatcctcggaaaatgccgttcgccgcatataccatcagcatgcctggcgcacccagcacgattgcgcgcgtataggtcacggcttgttccaatacttcgccctgaccgcccagtgcccggcataatggctcggcagccgcgaacaatcccaatcccagtacggtgccgatgctcaaggccagccacaggccgtcaatgcctgcctgcagtcccgcgcgacgacgacccgctcccagcagatgtgccacctgcgcagtggtcgagtaggccaggaatatgcatagtccgactgccgtgaggatgatggtggagccgattgacaggccggccaacgccgcatccccgatatggccgacgatggctgtgtcgataaggatgaaggtcggttcggcgatgagctggccgaaggtcggcagggccagcgccatgatccggcggttggtggagcgggcgtcggtcgggccgttgctgacgtttgtatttgcgccggcatgcggggtgccgaagccatcgcggcgtgtagtatcgccggaactggtggctttggcgtcggaagagtctatgggcacgctcacacgcatatcacgcctgactgcgttgcgcaagcacctgttgtgggcgcggaatgttatccccagactatccactaagttatccccagtatgtggataacttagtggattatccccagaattatccccaaaatgtggataacttatttttctatccacattttgctttctgcgtgtcgcggcgctgactcataggtgaataaggaatgaaccgatgcgggcaaccgtttcgtttccatacgatatcgttcacctgccacgccacatcctatacttggaggctatgccagaaggaagtgaacactcgtatcagaatgggttcggcggtggcctggatcgtggcgatcgtggcgaccgcgcgggccggggcggcacgcagacgtcggcggcggccggcgacccgattttcgaccgcgtgcccccgcatgatgacgacgcggaaatggccgtgctcggcggcatgctgatgagtaaggatgccatcggcgaggtctcgcagaccattgacgtcaccgatttctaccagcccaagcatcagacgatctataacgcgatcatcgatctgttttccgccagtcagccggtggacgtggtgctcgtggccaaccagctgttggcggatggcaacctcgacaaggtcggcggcgcggactatctgcacagccttgtcgcatccgtaccgaccgccgccaatgccatgtactacgcggagatcgtccatcagcgggccattttgcgcaatgtgatcgccgccggcaccaaaatcgcccagctcggttattccgccgagggatcgcaggctgaggatgtggttaacctcgcccagtccgagatctacgagatgtcgatgggcaaggtgcgtcaggactatgccgccatcggcccggtggtccacgacgcgctcgaccagctggacaaactgcagcaaggcctcgtcaacaagggcgtgccgaccggcttccgcgacatcgacgacgtgacccagggcctgcagcccggacagatggtcgtcgtcgcaggacgtccggccatgggtaagtccacgctcggcatcgacttcgcccgcgctgccgcgttgcagcacaatatgacttccgtggtcttcagcttggagatgagcaaggtggagctcgctcagcgtattatctccgccgaaaccgatattccgatggccgccctgcgccgcgccgacgacatcacccccgaacgctggaacaccctgaaccggttctggaccaagatgcagaacgcgccactgttcattgacgacagtccgaacatgagcctcatggagatccgcgcgaaatgccgtcgtctgaagcagaccaacgatctgaaactcgtagtcatcgactacctgcagctgatgacctcgggcaaggccgtagaatcccgccagcaagaggtgtccgaattctcccgtgccctgaagctcttggccaaggaactcgaagtgccggttgtggccctttcccagctgaaccgtggcccggaaatgcgtaacgacaagaagccgcagctctccgacctgcgtgaatccggctcaatcgaacaggacgccgacgtggtgttcctggtccaccgccctgacttttacgacaaggaagaccgccccggcgaggccgatatcattatggccaagcaccgtaacggcccgaccgaaaccttccacctcgccttcctcggtgccacgtccaaattcaaggacatgccgcaggactacaacgccaatcagggggtgtgatgatggcaagcaacgtttcacgcgatgtttcgcaagaccaatcgtccgtggcgcagacctgcaaaccgtggtatgcgttcgccaccgtggccgcaggccgcttcgtgcggtttgcatcccgcgtcaccaaacatggcggttcggctttgcccggcaaagtcgtagaaaagattgaccccggcttcctgacccgtacgctcgggcagttgccgcttggcgtggtattggtgtccggcacgaacggcaagaccaccaccacccgcatggttgcctcgatgctctccgatctggggctgaaggtgttcaccaatccgaccggctcgaacttcgtgcgtggcgtggtctccgcactgcttaccgaagtcacgctcggcggcaaattggacgcggacatcgccgtgctcgagctcgatgaggcgtacgccgtccacttcgtcaagcaggtcaagccccgttatgcgttgctgctgaacgtgatgcgcgatcagcttgaccgattcggtgaaatcgacaccacggccaaactgctcagccatgtggctgcggcgactaccggcactgtggtactgaaccgcgaggacccgcgtatcgctgcgctcgccgcgaaggccccggctggcaccaccgtgcgatacttcggcctcgccgacgatttgcgccactatttcccgtccgatgacgacatggccacgaccgtgtcggtggaaggtgtggccgggccgctcccctcagtcagaactcctctcagtccgcgaagcgaactgagaggagcttccgcaggcacggcagaacttcccgccgacgtgacacttaccgccgtgggcgaccacaaggccaccttccagatggacggtcagggctacgccaccgacgtcaagcttgaaggcgtctacaacctgtacaacgcggccgccgcgctcgctgtggtacgtgcggtgatgcaagacaatgccgccgcatccaaggccaccgccgcaaccaacgcctgcgccgtgtccgccgacgagctcatcgccgccgtttcccgcgtcacgccggctttcggccgtggcgaggtcatcgacgtcaacggttccccggtcgaactgctgctggtcaagaacccgatgggcttccgcctctcgctcgccagcttcgacccggccaacgcggacaccatgatcgccatcaacgacgaatatgccgacggccgcgacatgagctggctgtgggacgtggacttcacttccctgcgcgcgtccggtgtcgccatggtctccggcgtgcgtgcctgggacatggcattgcgcttggggtatgaccaagtgccagtcgccgatacgaacaccgacctcgaacaggccgtcaccgcattcgtcaacgccaatcccggcacacgcaagcacatctactgcacctacaccgccatgctcaaaacccgcgccgtactgggccgcatcaccgaagtacgggacgcgggcgtgggcaagtaaccacccttcggcgctcgcgcgccacctcccgccagcggaagggacatggtgagggaataagacgcttcccggcagcgggagaacatcgacaaggagaacgtgacatggccagaacaattgatgtggtgtccctgtatcccaaagacatgaacatctacggcgattccggcaacgtgctgactatccgccgccggctggaactgtacggttacgaaccggtcgtccaccagtacaatcaaggcgacgactggcccgaccaggtggaccttattctgggaggcggcggccaagacaccggccagaagaaaatcatcgacgacttctaccatcgcgccgacctgttgcgttcgcttgccgcagacggtacgccgatgctgatgatctgcggcctgtaccagctgttcggcgagtactttgaaaccgtggacggcacccgtctggacggcatcggcgttatcggtgcttataccgtgggccagaacgtgcgtatgatcggcaatcttgttgagcattccgaccagttcggcgatgtgattggctacgagaaccactccggccagaccttcctgcgcgaaggcgttcagccactcggcaccgtcaatcaggacggccgaggcaacaatggcgaagaccataccgagggcgcgcgcgtgcacaacgtgatcggcacctacatgcacggctcgttgctgcctaaaaaccccgccatcagcgatttccttatcgaaactgccgtgactcgtcgttacggtacgttcgatacgtccgatcagacccccgaacaagccaaggagctcgcccggctcgatcaagtagccaccaacgcgcgcaaggctgccgccgaacgtcctcggtgaattctcggtgagtcctcggtaagtaccaatcagcgaaaaatcagtcgaaatcagtctgagggtctagtacattgccctgttgtttgcgctaggcttggtggtacgagacatggcaccaggccatgtcggacctcgaaggaggggtatcatggctgattttgatcttctgggtgatggcctgcgcaaggtcctgctggcgggcatcggagcccttgccaccggatacgagaagagcagcgagctcgtcgacgaactcgtcaagaagggtgagattacggtcgagcagggcaaggcgctgaacaccgagctcaagcgcaaggtgagcgagacggtggatgacgccaagaaggccgccgccgaagccggcgacaaagctgctgccgcagccgacaccagtgccgccgacaagcccgctgacgagggcaaggccgagtgaccaagcccacacgcgctacgccggaatcagggtcgaccccgctttccagcagggtcgaccctattctgacgcctgcgaaagccgaacgtgaggcggcggcgaaccggtccgtcgacacgtcggacacgctcaagcagaccgttaccaaggcgactccgagcgtatccgacgaaacgctggcactgttcggacgcaggaacgatttcgccacgcgctaccatctgacgcgccgtggcaagatcaaacgactggggcagatcaccagaatcgtcgagcaattcgacgtgctgcacggcctgactccggtcaaaatgcgcctcatgttcgaggcgctcggccccacgttcgtcaaagtgggccagattctgtcgatgcgctccgagattctgccgcaaagcttctgcgacgaactcgccaaactgcgcgccgacgccgacccgatgccgtattccacggtgttggatgtgcttgccgccgaatacgggcgtcccgccgacgaggtgttcgcgcatatcgatcccaagccgttgggctctgcttcactggcgcaagtgcatcgcgccacgctgaaaaccggcgaagatgtggctattaaagtgcagcgcccgggtgtgcgcgaaaccatggcccaggacgtctccatcatgcgctccatagccaaggccgccactaaggtgattcgcacctcacagatcgtggacctgaagggcgtggtcgaggagctgtgggacaccttcgaatcggagactgactttctgatcgaggcccgcaatctcgccgaattcaagcgtttcgccgcccgattcaaatacatggactgcccgacggcgtacaccgaactgtgcaccgagcatgtggtggtcatggagtacatcgacggcatctccgtctcccatccgggccggctcgtcgatgctggttatgacttgaaggagatcggcaccaagctcgtcgacaattacgccacgcagattctcgacgacggcttcttccacgctgacccacatcccggcaatatcatcatccggggcggccagatcgtacttatcgacctcggtatgaccggtcggctcgaccagcgcacccgtgcagtcctcaaagaaatgattttcgccgtcgccaaacaggattcgcccgctctggccgaggggctgctgcgatttgccggcaccgaggccgatccggaggactacccagcactgctggctgatctggacgtgatcgtcaaggaattcggcaccgtggatctggccgaactggacattgccgccttcctgaccgcactgacgcagatggccggccgccacaacatcgaggtgcccagtacggtgaccaccgtcggccgcgcgttggttacgctcgaaggcttgctggacgagttcattcctgatgtgaatatgatcgaaatcatttccgaccatatcgccacgtcgaaatcgctgaagaacgccaccaaagacgagatcaagtcgctgggcgttgagggacatcaggctttgcatgccacgctcggcaccatgaccgaactcaagaccgtggcccgtatgctgacccgtggtcagttgcgcgtcaacatggaactggtcggctccgaagagccgttccagctgctttcggatatggtgaatcgtctgacgatggccctgattgtggtcggtttgttcgttggctcgtcgattgtctactacgccggcatgaagccgattatcttcggcattccggtcatcggcttcatgggctacgtcgtggccttcgccctcggcgtatggatcgtcatcgacatctacttaaaggggcgcaaaaccaagaagcggtagggtatcgattgatatcagtccagcgggagggtggattcgcgctggataaggtggcagggtacgtagtcgacaccgtgatgcgggttgccgtcgatggcatcgaccaagtatcgtgccgcacgccgtccgatggtttcggtttcgttgtcgatcgacgtcagtgcgggcctcgagctggaggtcagtaccgaccagttatcgtggccgatgacggcgacgtcatccgggatgcgcagtccctgctgcttgagcacgtcaatgcagcctcgggccagttggtcgttttggcagaccactgcatcgaacttgaccccttggtcgagcagcaggcgggtggcggcgcggccccagccttcgtcccatttgccgtaccggattggcccggccggttcgatgcctagctcagccagtgcctcgagcgcgcccttggtgcggtcggtggcagcggtataggtttcgtcgccgccgataatggcgatgtgccggcggccacacgagatgagatggttgatggccatgcgaccggcgtccacgttgtcgcaagtgaccgagcagtctttggggtcggtggaggggccgtagacgtagaccagtggcacgccccagtcatggccaagcgtgggcctggggttggtctcgcactgcacgatgagcagtccgtcgaccttgagggacagcagtttctcgacatgctgacgttccaaggcggcgtcgccacgagcgttggccaacaatactgaggtcgattgggctcgcaactcgttctccgcgccgataagaatcggtgtggagaaacgaccctgcagatcggaggtgaccaggccgatggtgccagtagtgcctcgagccagggattgggcaagcttgttgggagagtagttgagttgcttggcggcatccagtacacgctgcttggtttcttcgctgatacggggtttgttgtgcagcgccttggatgcagtggccgtcgagactccggccaatgccgccacatcctcaagtcgcgctgcccgtccggttgctggctgggtcatcatgcctcgattccttggttcttcagcagtatataacgcattgttttgcgatgaaatacctcatacggtgtggtgcgccattgcatctgggaataattgtagcttcaatgcgaaaactttcgcaaacatctttttttcggcgtggcgtagtcagggaaattgttcaagtgcaaggtaagtgaaagaaagcgttacttccatgttcgcttttgtttgatttgctcgacacgccggaataatcattgatattaagccaattcaagcacgttattcatagtcgaatcacagtctcgaacccgtttgatgtgagaaaaaacgcgaaaatgcgaaagcgcttttgcaaaaacttccatgttcgtttatattgagaaaaggctttcgcagtgttacctgctccgggcaaaggagcgagcagggcgaaaccaaggaggcggaccgtccgccaccgcctctcatagttgagcggatatatagagaaagaagcgaacatggtgtctttcaataaactgacccgtactcttgctggcgtcgctgccgccgcgttgatcgttccgctggccgcctgtggtggctccggcaatggtggcactgccaccgccgaaggtatcccggccaagggcaccgacgatggtaccgagatcaccctgtggacccgttcccctctggagcgtcaggccaagaacgtggtcgaggcttacaacaagagccacaagaaccaggtcaagctcgagatcatcccgaacgacgatatggaaggcaaggtcggcggcgcttcgcagaccgactccctgcctgacatcctcgccggcgacgtggtccgtattccgtactgggcttccgagggcatcttcaccgacatcaccaagcaaatcgatggcctggacaacaaggccgacctgcagcagggccacatcgaagccggtactgttgacggcgccgagtacaccctgccgttcatcactgacgtttccgtgatggtctggaacaagaacctgtacaaggaagccggtctggacccggagcagggtccgaagagcatcgaccagttcgtcgagcaggccaagaaggtcgccgccctcaacaaggatggcgtcgcaggctcctacctcgccggtcagtccggtggtgctctggtcttcgacctcttcccgtccgtgtgggctgacggcgaatccgtcatgaacaaggatggctccgaggccaccctggacaacgactccatgaagggcgtcttggacgcttacaaggagctggccaacaccaccaacggcctgggtgcaggctccgaggaagagaccggcgccacctggaccgctccgttcgcgaacggcaagatcggcgttatgccttacccgaacacctccaccactgctctgttcgatgctgagaaggacggcggcttcgaggtcggcgttgctccgatcccgggcaccaaggaaggcaagacctccacgttcctcggcggcgatgccatgggtatctccaaggactccaagcacgttgctcaggcctggaacttcctctactggctgatgcagtctgacgctcagaaggaagtcttcgctgaccaaggcgacaccgcctccaacatccagaccctgaagaccgcttacaaagacgctgacccacgcatccagaccatcaactccgtgattatcgacggcaacggccagaccccgaagtccccggccttcaacgaagccttcaacgccgctggctccccgtggcagctgctcgtgcagaacgccgtgtggggttccggtgacctcaaggccgacaacaaggccgtcaccgacgtcctgtctgcccagtgattcggtggtgatgctcctcaccatcactcatcaaatcacagcaataactgaataataactgaacagattgagccggtccctcccttgtgagggcaggagccggctcaaccacataatcgaacttctatcttcttcttcattccttctcttccttcatcactacataccttatgaatgcggtgtgttggcggggcttcggagtcctccttcctcgaagccctgacatcggattgcattcggattccgtgattaccatttcacagtaatttcccaaaggagagagaaacatgtcgagtgtttccaagagcgccggggctgtgcccgtgcataagtccaaggcgaaggcggcgcagaccaggcgaggtctgctgtacgcacttccggactggctgatgattatcgtcctgttcttcgtgccgattgttctactggtcatcatggcctgctctcgttggagcctgctgggcggcaaccgtggtgtgaacttcccggacaacttcgtcaaggtgttcgagaacaaattgttctggccctcgatttggttcacgctcgagtacaccgtgatcgtcacgatcttcctgttggtccttggcctgggcatggccatgattgtgcaggagagctcgaagtggaacaacgtgctgcgtacctgcttcctgctgccgtccgcgacgggcctggcgtccgcgtccctgctgttctacgccctgtattccccgcaggtgggccctgtcaccaagattctgagctcgttgggcctgatgcaggagggtggttcggtgctggccaccggccagtcggccctgtgggccacgattatcgtgattgtctggcgattctcgggctactacatgctgctgatgatgatcggtctgcaggccatccccggtgatctgtacgaggcggcccgcatggacggcgccggttcctggcgtatcttccgctccatcaccctgccgctgatgaagccgaccatcgtgatgtgcctggtctactgcgtgaccggttcaatcctcgcgttcgatcagttcttcattctgaccaagggtggtccgaacaactccaccatgaccgtggtgcagctcatctacaacttcgccttcgattccaagaaggatctgggtatggccgcggcgctctcgctgatcgtgctggtggccctggtcatcatcaactccatccagatgcgcggcatgcgcgacaacaccaagtgagaaaggggaggtaacacattatgactaccccattgtggaagcgcgtcatcgctcgaatccttgaggctctgctcgccatcatcttcatcagcccgctggtctgggtcatcatctgctcgttcagcccgcaggccggttcggcccagtccaagggctggggcgtggccaactacctgaccctgttcggttatcaggaaggcctgcccaagtacctgctcaactcggtaatcgtgaccctggtcgcggtcgtgttctccgtggtcgtctgcacgctggccggttactcgttctcccgcttcgactacccgggccgcaacctcggcttcatggtcaccctgtccatcctgatggtgccgtacgcctcgctgttgatcccgctgatggtctggtacaagcagatcggcctgaacgacagcctgctgggcgtgggcctggtcatcacactgttccagctgcctatgagcacgttcatcatgcgtaacgcatttgacgcgatccccaaggacatggaggaggccgccatggtcgacggctgcaacagcctccaggccttgttcaagatcctggtgccggtggtcaagccttcgatggttacggttggcctgctcgccttcctcgaggcatggaacaacttcatgattccgctgtacttgagctcttcgtccaagtccacgttgccgctggcgatggtgaacatgcgtcagcagaccatgggcgtcatcgattacggtgccaccgaggccggcgtcgtgatcctgctgattccctgcgccatcctgttcctcgcactccagaagtactacgtcaagggctttatggccggagctgtcaagggctgacggctcgtgccgccggcccttggctgggagaccggtgggttcccagcaagctccgtgctgagacgcgacagcgtcgaagccaatactgagcccggctgaagccggtccttaattgcagggccggaggcggtgtggtcaagggccttaaaaaaaggacaatcatgaacgttacaatcacttccccgttctggaagcggcgtcgcgaccagatcgtcgaatccgtcatcccctaccagtggggcgtgatgaacgacgagatcgacaccacggtgcccgacgacccagccggcaaccagctggctgacaacaagagccatgcggttgccaacctgaaggttgccgccggcgaattggacgacgagttccatggcatggtcttccaggattccgacgtctacaagtggcttgaggaagccgcctacgcgctggcctaccacccggatcccgagctcaaggcgctgtgcgaccgcacggtcgatctcatcgcccgcgctcagcagccggatggttacctggacaccccttaccagatcaagtccggcgtatgggccgaccgcccgcgcttcagcctgattcagcagagccacgagatgtacgtgatgggtcactacatcgaggccgccgtcgcctaccatcaggtgaccggcaacgagcaggcccttgaagtcgccaaaaagatggccgactgcctggatgccaacttcggccccgaagaaggcaagatccacggcgccgatggtcatcctgagatcgagctcgccctcgccaaactgtacgaggaaaccggtgagaagcgttatctgacgctttcccagtacctcatcgacgtgcgcggtcaggatccgcagttctacgccaagcagctcaaggcgctgaacggcgacaacatcttccatgatctcggcttctacaagcctacctacttccaggctgccgagcccgtacgcgaccagcagaccgcggacggccacgccgtgcgcgtcggttacctgtgcaccggtgtggctcacgtgggccgactactcggcgatcaggggctgatcgacactgccaagcgtttctggaagaacatcgtcacccgtcgcatgtatgtcaccggtgcgatcggctccacccatgtgggcgaatcgttcacctacgattacgacctgccgaacgacacgatgtacggcgagacctgcgcttccgtggccatgagcatgttcgcccagcagatgctcgacctcgagcccaagggcgaatacgccgatgtgctggagaaggaactgttcaatggctccatcgccggcatctcgcttgacggcaagcagtactactacgtcaacgcactggagactactcccgacggactggacaacccggatcgtcaccacgtgctctcccaccgtgtcgactggttcggctgcgcatgctgcccggccaacatcgcccgactcatcgcttcagtggaccgttacatctacaccgagcgcgacggcggcaagatcgtgctgagccaccagttcatcgccaacaaggccgattttgcttccggccttacggtcgaacagcgttcggacttcccgtgggacagtcacgtggaatacacggtgagcctgcccgccagcgctgcggacagctcggtccgatttggactgcgcatccccggctggtccttgggctcctacacgctgaccgtgaacggcaagcccgcagtgggttcgctggaagacggcttcgtataccttgtggtcaacgccggcgatacgttggagattgcgctcgagctcgacatgtccgtcaagttcgtgcgcgccaactcccgcgtgcgttccgacgccggccaggtggccgttatgcgcggcccgctggtctactgcgccgaacagaccgataaccccggtgatctgtggaactatcgtctggccgatggcgtcaccggtgcggatgccgctgtggctttccaggccgacttgctgggtggcgtcgataccgttgatttgccggcagtgcgcgagcgcgccgacgaggatgacgcgccgctgtacgtggatgccgacgaaccgcgtgcgggcgaacccgcgacgctgcgcttggtgccgtactactcgtgggccaaccgcgagataggcgagatgcgtgtcttccagcgtcgataaagatcggcgatatgccggcctgcgcgcaactggccggcaaaaaaatacttatgccgccatcgtctgcaataagtcgatgacggcataggccggatgtcagtatcgattggagccgaaaacacatccggggaatgaggtctcctgtgcggggtaatacccgtgcaggagattattttttaattatatgctcctgctgtgagagctgtcggcggagtcgactgagggcggtcataagcggtaccgtgtaagccaccctcagtctcgctttgcgagccagcttccgccagcgggagcctgttggttcctgattcagcgaggctgaatcgttgcgccgtaggtactgcgacacggcgaaacgcagcaatgctctaatgcgaaaataaatgcgaaagctgagaaattaccgggtttttgttgtataagatggttgatatcactgagggaaagttgtgaaaccgtattcgctcggttatgatgtggaatcagcttcggtgaattgctccaaccgggatatccatggcggatatcacaccagatttactgaagacactcattccggtgaacccaataaccaataaaggaaactgatggagaacgggctctgcggcccagcatccacagaagaagtcctggtcgcatagacgcgacgtagcctgagcgaagacgcgaaagaccggggcggagaggtccaagcaggaatgcatcaatcaacacgaaagcggtggcttgcgtcaatcggcgcggttgcagcggtcgccacactggccaccggcggtgcagtcaccgcgcaggcagccgatgcgcccgtcatcaagaatgcggatgtggcatatccgtcgttcaaggggtctgatgatccgatgaagacggcggcgaacaacaccacatataaccctgccgccagctatctgcaggagacattcgataacgacgtgaagaacctggccggcaccgacaccgaccatgacttctggatcgataagattctcacccgtactggtgcacagccaactggtaaaggcacgaacgacaagggtgcttactcgtatgaaggctccgacggcaacaactacctgttcacccgtggtcgcgccgcctacatgtacacgcacacgcctaatcggctcggttttgtgggtaacaccgcctactgggatgagaccaacagggatggctttaccgttaccgtaaacgctgacggtgcaaaccagacccttaacgaagacgcctcccagcgcaagcagacgccgagctacttcacctccttgttccagaccggtggcaagagcctcaagatcaaggaagttaagtacatcacctacaacaacgtgatggttgcgaacctcaccgtggaaagcacgcaggaccgcgatgtcacactgaccacggcctcgccgttcgccgccgagggtgctgatggggccaccgaacttactggccgcgtgaacgtcaagaacaacctgacgaccatctatccgcgcttctccgccaacaaccaggacggttccaactggatcgtcagcggtggcaaactcaccagcacgttgagcctcaaggccaacgaaccgcagaccgtcaagattcagctcggcctgatcgccaacgaactgcctgactccaccaaggaatatgaggcccgttacaccggcgaccttaaggatgctgccgcctcctacaaggattccgtgaccacctacaacaagtggtgggtcgataacgctccctacgtggacactccggaagacaacatcgataagaccgtggtctaccgctggtggctgagccgtttcaacatgctcgacgccaacatgcctggcaacaccttccagtacccgacctccatcgagggtgtgctcggctacaacaaccagatcgtgctcacctccggcatgttcatgatggacaccaagtggttccgcaaccccgagtactcctacggcacctggctttccgccggcgataccgccaagaagagcaaggcgggctattactactaccacgacaatccgggcgacccggccaactggaaccatagctacacgcagtacatcacgcgcgccggctgggactcctacaaggtgcacggcggtccgtccaccgtggccgagaagctggccgaccagggtgccgaggacgtgcaaggtctactcgcttccaagagcgagccggacaacaacgacaaccagaacaacaatgacaacagcttgattgactggtcctggtggtcgatgaccggtaacgatgccgacgccgtttccttctctgagccgggtcgctccggccagcgcatggatcgcgccgatggttccgccaatatgtgggccaacgctaacgcggctgctcaggcatacaaggctgctggcgataccgccaacgccgagaagatgcaggccatcgccgacaagatccagaaagaagtcaccactgaactgtgggacaagtccgacaacctgctcaagcacaggtggctgaacgacggtgctttcgccaagtacaaggagatcaataactactacccgtactccgaaggcctgatgcctaccggcaacgaagattacaacaaggctctgcgcctgttcgaggattccaacgagttcccgatcttcccgttcttcaccgccaaccaagcggacaaggccgcgttgaacttccccggttccaacaacttctccatcattaatgcgcagccgctgctgcaggtctactcggccggtattcgcaactacgatgcagccaagaatggctacatcaccaatgagcagttcaagaagctgctgtactgggtggcgttcgcgcactaccagggcggcgataacaaccaccctgatcagaacgagttctggaacgaggacaacaacaacgtcggcgatgtgaacggtgacggcgtgatcaacaacctcgacaagaaccttgacgccgcacagaacggcggcaagatcacctaccgctcctggatccaccacacccagctcggcaccacgaactggacgatggtcgaggacgtagccggtatggtgccgcgcgaggacaacaagattgagctaaacccgatcgaaatccccggttggaactacttcacggtaaacaacctgcgctaccacgatcaggatgtctccatcgtatgggacaaggacggcagccactacggtggtcctgctggctacagcctgtacgtgggcggcaagctcgccttcacctccgacaagctggcgcacctcatctatgacccggctgcgggaacggtcgaggtcaaggacgattccggtgcccaggttaccgtcggcgccgaagccgtcaagaacgtgaaggccgccaatcaggttaccttcaatgccgatcagcgcgtgaccgacctgttcgccaagtccggcaccaacgtcgactccgcctccaagtccaccacgaacgtggccaaggacgcggacgtgaccggtaccacctacgccgagaaggacaccaactacccggccaagaacgcggtggacggcaagaccgtgatggaatcgttctggggtaccaagggctccgggaacaagaccgacacgctcaatatcaagttcaaggacggcaagcagaagatcgacgacatccgcttgtacttctaccagagctcgtccagccagaccatctccggctatgccgagcccgccaactacaagttggagtaccagaaggatgacggcacatgggccccgattgcggatcaggtgcgcaccccgaactacgcgggcgcgaactacaaccgtatccagttcactccggtggagaccacgaccatccgcgtcaccttcacgccgcaggccggcatggccgtcggtgtcaaggagatcgaagcctacaacaccggtatcaaggctgacggcacttctgagaaccagactccgcaggtggatgcttacgtgtcttccagcacctcatccggtgccaagctcgtcggtacggtgaaggatgacggtctgcccgcagaaggcgacgtcaccaccacatggtcccaggtctccggtccggaaggcggtgctgcgaagttcgtggacgcctccgctgccagcaccaccgtcaccttcaacaaggagggtgactacgtcctgaagctcaccgcttccgatggcgagaaggaaggctccaaggaaatcaccgttcacggcatcccctctgacggtaccgtgaacgtagccccgcagtcgagcgcctctgccagctacaccaacggctaccagccgaaggacaacgccaagaaggtcatcgacggtcaggtggtatacgccaacacgccgaacgagacctggaacaactggggcgacaacaccggtgtggagccgtggctgcaactgaagtgggccggcaaggtgccgctgaagaaggccaaggtcttcttctggaccgatggcggtggcgtgccgatggtctcatcttggaagcttcagtacgctgacgctgacggtaactggcaggatgtgaaactggctgacggccagtcctacacggtcaaccggaacgaaggcaacgaagtgaagttcgccgacaccgtcgaaaccaacaagctgcgcgtggtcttcccgaagggcgccatcgtgggtgcttccgagttcgaggcgtacgccatcgagccggtgagcgtggacgaagtcaaccgactggtgcagaccggttccaaggccgatgatctgaagctgccctccaccgtgagcgccgtatacaccgacggttctcgccgtgacctcgccgtcacgtggggtaaggtgaccgacgctcagctggccgccgatgccgtattcgatgtcaagggcaccgtcgccggtgcgctgaacggtacggttgcacacatcgcggctcgttccgataccgcatcgcagaccgtgggtaatgcgcagccggttgagcagaccgtctaccagaacgccaagtccatcgacctgcccgccacggttccggtgaagttcccgaacggatacaacgacgaccgcaaggtcacgtggaaggatgccgacatcaaggccatcgacctgaccaaggttggtgactacgaggtggctggtaccgtcgacgacggttcatcttccgcagctgccaagctcactgtccacgtggttgccgacccgaacggttcctccactccggagcctgagcctgagccgttggtcggttggattgaaggcaaggcgaccaggaccaccatttcgcctgattccgaggcgacctggtcaccggccgaaggcaagctcaacgacggcgtagtcgtcgatgatacttggccgaccacggatgatcagaacgtcaacgacaaggtctggggttcttggggcaaggcaaaggacggcatgtacgcccagtacgacttcggtcagtccgtgaccattgaccagagccgcgcccagttctgggccaacttcgctgagactgacgattcgaagggtggtctggaagccccggacgcttggaagattcagtacctcgccgaggatggttcttggaaggacgtcgagcccaccgaggattacaccgtcgtgcgtaattcgccggcttctcgtgcggataccgatgccaagggttggagcgctgtgaccttcaagccggtcaccaccaagtcgctgcgactcgtgctcactccgtacaccggcagcagcaccttcggggccgccgtggccgagtggggcgtgcatggtattgacggcaccgagcctgaacctaccccggtcgacaagaccgcgctcaagtcggctcttgacgcagccaacggcctcgatgcaagccgctacaccgccgcttcatgggctgagttccagcaaatcattgacgctgcccaggctgtgtacgacgatgtcaatgccaccgaagaacaggtcgccgagcaggtgaccaagctcgaggacggccagaaggcgctcgttgcgctcgccaccgacgtggagaagtccacgttgcaggcggccatcgacacggccaaggccgaggccgcttccggcaagtacacggataagagtgtcgaggccttgaacaaggccatcgaggctgcggaaggtgtgctcaagggcgatgagtccggtgaggtcactcaggccgccgtccaggaagcgtccgcttcgctgaacaaggccgtcaaggccttggaagagaagcccgccgtcgaaacggtgaagaaggagtctctcaaggcttccatcgagcaggccaagaaggctgacaagtcgaagtacaccgagaaggcatggcaggctctgcagagccagattgccgccgctcagaaggtgtacgacgacaaggacgccaagcaggccgacgtcgatgccgcacaggatgctctcgacaaggcgttctgggccacgaagccggagcagaagcccggctcccagcagcccggcgtgaccgacggcaagcagaacgacaacaagggcagcctgaccaatacgggtgtggctgtgctcggtgtcggaattctcgctgtgctgttcgccgccgcgggtgtgaccatcctgaagcgccgccagtccggtgctcacggttcggcccgccactctgcctgacccgcaacggagtcattctgccgagtgagccccctcacagagggggctctagccttttccttctacccatcattactcttttcactcactcaatgaggagcactatgagtttccatgtatccgcgcaatcggttcgcgcggtggccggtggactcgtcgccgcagcgacattgctgccaggccttgccctcgcgccgaccgcaatggccgccgattcagccaccgctgacaacgcgcccagcgttgccggtcacgcgtataacgaactgccgtataacaatcctgatgttaccgtcacccaaatcgacaatagctcactgcccagctacatgcgcaaccccatcgggcagaacgagggtattgacaccccgaacgatctttcgcagaactactactctgcggatgcgtccgcgctgagctatgacggcaaactcttcgttttcactggtcacgatgaggcttcgcctgactacggctccttcaatatgaaggattggggcgtatacgtcaccgatgaagatggtctcaatcgaggcaaatggacacattacaagaccatcgccaaggccgacctattcagctgggctaccggtgatggcgcatacgctggccaagttgtgaccgacgataacggcactccgaacgacacctccgatgattggttctactactacgtaccggtgaaggacaaggcttctgaggcggccggacaggacccgttcgccatcggcgtggctaagtcgaagagtccgctcggcccgtggaaggatgccatcggtaagccactgctcaccacatcgcaaacccggattgaaaccatcgatccggcattctttgtggacgaggatggcaccggatatttgcactttggtacttttggcacccagctcgcaatcaagatgaagaaggacgccacaaccggccgcacctcgtacactgagaccgaaaccaaggctgatggcaccacgccgaacctccacaccatgaaggacgcggacaataacgcgaatggtccgaagggcttctttgaggcggcatgggtgttccgtaagggtgacacctattacaacgtgtacgacggtggtaagccgggctcaggtacagccacctgcgtggaatcgaactaccaagcttgcatccagtactccacttctgacagtccgctcggaccgtggaagtatcagggcgtgatcgtgccttccggttccgctaccaccatgcacccctcagtgctccagttcggcgacaaatggtatgtgacctaccacaccggcgataaggaaggtggcaccgatttccgccgtgccgtgtgcatcgatgaagtcgactggaccgctgacggccagatgacttccaccgcacatccgaccaaagcggagaaaacgcagccctccaccaacgtagccccgtacgcaaaggtgagcgcaacgttcaccgagacgccggcatacaagggctcggtgaacgatgggcgtgtactgcaaaccattgtggtgccaccgaaccactggaccaactaccgctccattccgcagccacaatccggcgactcgctggtctaccaatgggatggcactgtgcgcgccaattcgtccaaggtttggttcgatgtggattccaacgcgctgcgcgcgcccgcttcgtggaagattcagtacttggacgcggacggtacatggaaagatgtcaccagtccgagcggttatacaacaaccaccggcaaggccaaccccaacactgtcacgttcgatgcagtgaccaccactgctctaaagctcgacatgactggccaagctgtggatggaggctacgcctccttggccgtggctgagtgggaagtcggcgctgctgacagcgaatcgccggcaatcactgcgccgaagggcgtgacgaccgccaccggcaccgcgcccacgctgcctgccaccgtcgacgtgaagtatggagacacgaccgttgcttccccggtaatttggcgtccggtcgctgcttcttcctatgccaaggccggttcgttcaaggcctacggtgtggttgctggcgtgcccggtgaggcaagcgagcaaggcaatgtgtcggtgaacgtcactgttcaggatggctacaagcccgccgccgataccacgaagccgaccgtgaccgttgccgtcaccgccaacgcgggcaatagcgaatggctcactgccgctccgttcgccaccgtgcaggccacggacgataccacgccgattgccaagctggagatctccaccgaccaaggtaaaacctggatcaccatcgcggcgaatgccaacgcaactattgccgcgctttcccagcagggtgatgttgacgtgtgggctcgtgccaccgatcagaccggtaacgtttccgacatcgccaaggccagtggcaaggtggattccgccgtgccgaccgtgaaggccactgtcgacagggaggagcgcacgctgaccttgaccgctgatgacggcaccggttccggtgtcgcatcaattgaataccgcattggcacagacggtcaatgggccacgtacagcaagccgattgctgcaccgagcgcgtcgcgcgccaccgtgtactaccgcgccaccgataaggccggcaacgtgtccgcttcggcgaaaaccgacattccatccgacacttccgtgccgctgaccggctacattgagggcgatgccaccgccaccgatgtggacggcaaggcatccggctgggtcaagggtgccgccgcgttgaacgacggcaagatcattcccgatatcaccattgccaacgaggatgtctggggcacttggcccaacaccggtgagatgcgcctcgactacgagtgggatcgtgaagtgactatcgactctagccgcgtgcaattcacctcggatgatggcggattgggtattccggcatcgtgggaattgcagtactgggacgccttggcgaacaacggtgccggcaacttcgtggatattcccgatgccacctacactgtgaccgccaattcaccgtctgctggctgggccaccggcgatgccaaggggtggtctgatggcacgtggaacactccggtcaagactaccaagttgcgtatggttatcacgtccggctcggcttctccggctgttgccgaatggcaggttcatgccattgacgacagtacgcctgagcccacaccgatcgacaagaccgagctcaagcaggcgctcgctgactcgcctaaggctgacgatgcctccaagtacaccgagacttcatgggcggagtacgcggcggtattggattcggcgcagcaggtgtacaaggctgaggatgccaccgaagctgtggtggcggatgccgcaacccagctgaagcgggcagcgaagaagctggtgcttgtagctacggtgcaagatcgtgccgtgctgagcgctcagctcgatgccgctgctgccgtggatcggacgaagtggaccgatgaatcactggccgtgctggattccgcaattgctacggcgaatgcgctgattggtgacgatcgggccacgcagtctgatgtgaaggccgcgactgaggcaatcagcgatgccattgcgggtctggttgagaagagcaccacgaagcctggccagggtggcgataagcccggttccggcacggacaagcccaaccaaggcaacgattccaaccagaacaagggtgatgccgactccggcaagcacaagaagatacctgacaccggtgcagccgtgcttggtgttggcatcctcgccgtggtacttgcggttgcgggtgtaatcatcctcaagcgccgcaagtccggtacctgctagtcccactcgctcggcctagcatcaccaagcccccgcgcatgaacagcgggggcttcacttttgttcaataacaagcattatgtgcgcgtatgagactacgatggtggggaatctacgaacaggggcagcaatgacggcatacatggaccataaggatctcgccaacgaagttatcgatcaggcgcgcgcacaagagattactgatggtgtgcatcgcgtgcttgaccagattgccgcagcggagtccgcagccgggcgtgctgccggttcggtgcaattgctggctgccaccaagacgcgcgatgtcggcgagattctggcggctatcgatgctggtattcgcgtgattggtgagaatcgtccacaggagattactgtcaaggctgacggtctggcaaaacgactgggggagcgtggttattcgctaggcgtgattgatgccgctgaggctgacacggccaatgccgcggctgcaacgcatattcctttccacatcatcggccaattgcaggctaacaaaatcagtaaagtgctgccggtagtggacactatcgaatccgtggattccattgaattggcggagaagatcgctcgtcgtgccaccatgcgcggcatcacggttggcgtgctgctggaagtcaatgaatccggcgaggaatccaagtcaggttgtgcgcccagtcatgccatcgatctggcccaacgcatcggcgctatgggcggactgcgcttgcagggattgatgactattggcgctcatgtggatgatgagcgcacgattcgtgcgggcttcgcgcatctgcgccgcactcgtgaccagattcttgcctccggtgccgaaggcacggccgactgcaccgaactgtccatgggcatgacccacgacatgacctacgccattgaagagggctccaccatcgtgcgcgtcggcaccgccatcttcggcgaacgcgccttcatctgattggagctatacgaaaaaacgccgcttgatcaatagccaagcggcgttttttcgtaaggattttcggcgtatcaatcacgcatagatattgcgcggacgcatgtcctcgggcaggccgtcgagcagaatcgccacagaaccttcctcgaacacggagcgaatacccgcggccagcagcggtgcgcaagacagtacggtcatattcggcaggcgcttctcttcgggaatcggcacggtgtccataaacacgatttcatgcgcgccacagttggccagtcgctccacggccgggccggaaagcaagccatgagtggcgaccaaggtcaccgacttggcgccggattcgttcagggtgcgcacggcttcgcagatagtaccggcggtatcgaccatgtcgtcgatgaccacgcagtcgcggccgtcgacatcgccgataatgccatgtgcctcggcatggttcggacgagtaatatcacgctgcttgtggatgaacgccagcggcagattgcctagcttggcggcccactgttcggacaccttgatacggccggcatccggggacacgatggtggtgttgcccagatcaagggcggaacgcacgtaatcgagcagcaccggcatggcggttagatgatcgaccggaccatcgaagaaaccctgctcctgagcggcgtgcagatcgaccgtcataatgcggtcggcaccggcggcgtggaacagatcgaaaatcaggcgggcggtgatgggctcacgaccgcggtgcttcttatcctggcgcgagtagccgaggaagggcgccaccacggtaatcgacttggcggaggcgcgcttcaaagcgtcgatcatgatgagctgttccatgatccacttgttgatatcgcccgaatgacactgcagcacgaacacgtccgcaccacgcaccggttcggtgaaacgcacgtacatctcgccattggcaaagtcataggacgtggtttcgaggatttcggttcccaagcattcggccaccttctcagctagctcggggtaggcgcggcccgtgaccaatacgagtcgtttatccggagtgccttcaagaatcgccgacatgcgttcgcatcctttgtttgagtcgctgtgtgatttacgccttaaccagtgtacaagcaccccgccgcagcgaacgccacggcggggtgcctatttcgtaagagtgttgagattgccgaaattactcggagaactcgacactgaccttattgtctttgatggtgaagttgccgttgacctccttgccttcaagcgtgtacgtcagctgggcgctcacggtgccatcggcattattggaggtctgcgagatgcgcgcgttggtgatgcgcgtgttctcgcccgaggatgccttgccggtcagcagtgcgcgctggttcgtatccacgtgaggatcggcgatggtgttggccttgtcgtagttgccggaggagatggcggccacatagctgttcgcaacgctcttcgcgctgaacacggcggaagacagcacgccatacacgataccgaacagcacgaggaagccggccgcggcgccaacgatgatgaagattttcttctgctgctcattcatggtggtggaggtcgcgtcaggtgcggctaccggtgccgctccgggagtgatgggagccgcgggctgcgtgggcttggccaaaacggtggacatcgcgaaaccggcaagaatatgggcataccctgtcccgcctcatatatagactgtccaagttgcccgaagaggcggtgccggtttggtgctgcgtcatgggctaacacgcatacacactcctgccacggaacgtccgtggccgaatagtccgaaggaggtgggtgatgtctgcgcacaagtacgaactgatgttcatcgccgatcctgagctggatgagcgcggtctgaagaagctgaccgagcagtatctggaactcgtcaccaaggaaggcggctctttcgatgagcccgattactggggccgtcgcaagctcgcctatgagattgccggtaagaccgaaggcaactacgtcgtggtgaagtacaccgccgagcccgctaccagcgatgagcttgaccgtgttctgaacctcaacgaatccgtgattcgtacgaagattcttcgtaagggctgaatcaagcgtttagtcagctgaacagctggtattcaaggtaagtaagaaggaccgttatggcaggcgaaaccgtcatcaccatcgtgggcaacctcactgcggaccccgagctgcgcactattggcagcggtgcgaccgtggcgagcttcacgattgcttccaccccgcgaacctggaatcgtcagaccaaccagttcgaggatggtcaggcgctgttcatgaggtgctccgcttggcgtgatctggccgaccactgcgcccagtccctgaagaagggcatgcgcgtgattgccaccggtcgcctccagcagcgttcctatcaggcacaggatggttcccagcgaaccgtcgtggagatgcagctcgatgaaatcgggccctccctgcgctacgccaccgcacaggtgactcgccagtcgtccggtcagggcggcttccagggtcgttccggtggtttccagggtggtcagcagcccaatcagggctatggcaaccagggtggccaaggtggttatgccggtggccagggcggttacaacggtggctatcagggtggtggcgctggatactcccagcagtctgccgctcccgccaacccgtccgctcctgcggtcgacccgtggagtaatgccggtgcatctgatgccggtagcttctccacgttcggcgcttcctccgatttcggcggcgacgattccgacccggagttctgatcagtacttgcctccccgctgccagcagcaatcaatatcaagatttataaggagaacatcatgtcacgtaagaggccgcaaccgccggtcaagccgttcaagaagaagccgaacccgctgaaggccgccaaggtcaccgagatcgattacaaggacgttgcgctgctgcgtaagttcatttccgatcgcggcaagatccgttcccgtcgtatcaccggcgtgaccgtgcaggagcagcgtgagctgtccaaggcgatcaagaacgcccgcgagatggccctgctgccgtacgccacctcgggtcgctgagttagggaggctttgaacaatggctgaaaccaaggttattctcaccaagaccgtgtccaacctgggccattccggtgacgttgtcgacgtgaagtccggctacgcccgcaactacctgttcccgcagggcctcgctttcgcgtggaccaagggcgctgaggctcagatcgtcgctatgaagcgcgctcgtctggccaaggccgtcgctacccgcgaggacgccgtcgccgctaaggccgccatcgagggcactaccgtcgagatcgccgccaaggtgtccgagtccggcaagctgttcggtggtatctccaacgaggccatcgccgtcgctctgtccgacaaggccgcggtgaacccgaaggccatcgaggtcgagaccatcaagaccaccggcgatttccccgccaaggtggccctccacccggagatcaccgcttccttcttcgtgaaggtcgtggccgagtgagtcattccggcctagtgctggaatcacacagaccaagagtctgagcttaagcatcatcccccgtgcggttcgcgccgcatgggggatttttgtattagcaaaaacgccggaaataggcgcgacacgccgagagttgcattcgcttcaaatctgagtatatttatcacctgttgcaaggaatacttcaacatctaaccaagcccctgtagctcagttggttagagcagctgactcttaatcagcgtgtccagggttcgaatccctgcgggggcacagacaaccggaatcgaaagattccggttttttgttttttccagcatcagtccgtagctggtgcggaaaggccgtcttcgcgcgtgacggccggacgtgtaaggagcaacgtcatgcctcagatattcacgttcaccgtatccgaccccgaaggcatgcacgcccgcccggctggccggttggttgccaaagcgcaggaatatgaatcgagcatcaccgttgcctacggtggaaaatccgtggatgccaagcgtatcttcggtgttatgggacttgatgttcaacaaggtgacgaggttacggttcgggtgcagggcaacgatgaagctgtcgctgccgcagagttcgagcgattcctcaaggagcacctgtaatgagaacgatacagggcgtcggcgtatccgctggcattgctatcggcacggtccgcgtgctcgccgccgtagattatgccgtagaacgccgcgtaatcgacgacccgcaggccgagatggatcgattccgcgcggcccgtgacacggccgtcgctcagctcaagcaactgcgtgacaacgtcgccgctgagttcggcgaaaacaaggccgaactgttcgacgcccatcggcttatgctccaggacccggactatgcggaatgcgtcgaaggcttgattgcgcaagacaaggtgaacgccgaattcgcggtgaagagcgtcgccgaacagttcgccgccatgttcgctgcgatggatagctcgaccatgcaggctcgagccgctgatgtcaaggatgtttctcgccgcgtgatgaacgtgctgcaaggcaaacgcgatagcacggcgcaggatggcagtgtacaaggcgatgctgtgcagaacggtattgtgcagaacgggaccgcgcagaacggcgaaagccacatcatcttcgccgaagatcttgctcccagcgagaccgcgcagctcgaccgcgctaaggttttgggcctcgtgaccgccaagggctcaacgaactcgcacaccgcgattctggcgcgcacgatgggcctgcccgccatcaccggtatcggcgacgcctttgacccggccgatgatggtcacgttgccgtaatcgacggcaccagcggtgcggtattcgtcgacccggacgaggccacgttgaccgaataccggcgcaggaaggccgaagctgaggatcacctaagcctcctgcggaagctcaagggcaagcccaccgaaaccaagtccggtcagcgggtccacctgtacgccaacatcagccgtccctctgacgcagccgccgtgctggccaacgatgctgagggcatcggcttgttccgcagtgagttcctgtatctggaacgcgaggactggccgaccgaggaatttcaattcgatgcatacggacaagtcgcacaggagatgggcgaccgtccggtcatcatccgtacgctcgacatcggcgcggacaaacaggtcgactacttcaatctgggccacgaggataatcccgcgcttggtcaccgggcaatccgcatctgcctgacccgcccggagattttcaaagtccagttacgcgcattattgcgcgcctcagcatacggcaacatcgccatcatgctgcccatgatcacctctgtgcaggaggtacgcgacgccaagcggattcttgaagaagccaaaagcgagctgcgcggcgagcgcatcgacttcaacgagagtatccagatcggcgttatgattgagacgcctgcgtcggtcattatggccgacgagctggccgccgaagtcgatttcttctccatcggcaccaacgacctgacccagtacacgctggcctgtgaccgtcagaacccgagtctcgaacgctttgccgacccgcattcaccagctgtgctgcgcatgatccagatgactatcgaggctgcccatcgtcatggcatctggtgcggcatctgcggcgagcttggcgcagacttgagcctgaccgatacgttcctgcgcctaggaatcgacgaactgtccgtctcgcccaccagcgtcctgcccctgcgcaacgtcattcgcaaccactgagattcaaggtcgcttcggctgattccgatggctttttgggcattgcattcggctggacattcgacatcgcatcttgccggcatttcgtcgtggggcaaagtgtacaatcgccacgtttgctttcgcgcccagcgtaaatcgcgtcgccggctccgcgaacggatttccagtcacacagaatgccgtgaacagtcagccatgcctgttgcgcggcgaagagaaaagaagaagcagtggattatcctctctttaccaagctggccgccgagttcttcggcaccgccattctgatgatcttcggcaacggctccgtggccaacgtcgagctcaagaacaccaagggtcaccacgccggctggctgaacatcgccatgggctacggcttcggcgtcatgttcccggtgcttatgttcggtagcgtctccggcgcgcacatcaacccggccatgaccatcgcccaggccgtcaacggcctgttcccctggaatgaagtgctgccgtacattgtcgcccagctgctcggcgccctgctcggccagctcatcgtctacatcacttactacccgcactacaaggagaccgaggacgccgaggcgattctgggcaccttctgcaccactgacgcggacaaccagaaggccaactacttcctcaacgagatgttcggcaccctggtgctcgtcttcggcgccctgtgctgcctgtccctggcttggggcaagcaggattacgccgccgcctccatcgtcgtcggcttcattgtgtggggcctcgtgacctccatgggtggcccgaccggccctggcctgaacccggcccgcgacctcatgccgcgtctgctgcacgccatcctgccgatcccgcacaagggctcctcccgctggggcgaggcctggatcccggttgtggccccgattgtcggcgccattatcggcgcttggctgttcgtgttcttcttcgccagctgattcgttgattgattcatatatgcaaatggcctccgctcgttttgggcggaggccattgtcgttgaatcaggtaaacgcagagactactgctccaggaacacctgcggggccttcatgaagttcgtggcacagtgttcgccgcagaagtaataggacttgccctcatactcgcgcgtgatcgcgtcggcattcaccgccacggtcatgccgcacaccgggtcggtggcggtttcgccgtccgcgggggcggtgtggtgcatgtgcattcccgtatccatagtgttctccttgttggttggattattggattggtcagatacgtgattggtgtgattcagcgtggtgcgatcgtcgatgatgacggtcggctcgtgaggcgcgttggatgtggcggagccggtgatgttggcggcgttggctgattcggccgatccggctgattcgacatccgccatgctgctgcccgaaccggcgggaccatcggcaacgcccacgttgatgttcgctccatgcagccggttcgcgttcagcaccaggcacactgagctcaacgccatcgccagacccgcgatcatcgggctcaacagccagccggtgaacgggtagagtacgccggcggccaccggaatgccgatgacgttgtagccgaacgcccaccccagattctcgcggatgttgcgcatcgtggcattggacaggttgatggtcttgatgacgccgcgcaagtcgccgctcatcaaggtcacgtccgccgactgcatcgccacgtccgtgccggtgccgatggcgatgccgagatccgcctgggccagcgcgggggcgtcgttgatgccgtcgcccaccatcgcaatcagagtgcgggattgtgcggccgtgcgggaggtgccgtacgcggacttggcggcggcctcgtcgcgttcgcgctgcagtttggcgatccagtaggccttgccgtccggcttgacctcgcagatcaccgtatcgatgccgacttcgcgggcgatgcgcccggctacctcggccttgtcgcccgacagcatcaccgtgcggatgccgcgtgcgcgcaacgccgcgacggcctcacgcgagccttccttgactgtgtcctgctcgtagctcggcttgtcccagtcggcggccgcgtccaccacgccgcgcgtgatggtgccggtcttgtcgaacaccacggtgccgatgcgacgcgcctgttccagcgccttggcactggtgaccagcacgccgttggtggcgcccaagcccagcgagaccgtcaccgacagcggcgtggccagtcccagcgcgcacgggcaggcgatgatcagcacactgaccgcggtgaccagcgcgtgcgccagttgcggcgccgggcccagtgacacccagatggcgaacgtccagatggcgatgatcatcaccgccggcacgaaataccgggcgatcttatcggccagttgctgcaccggcgccttggtcgcctgggcgcgggccaccatcgccgcgatctgcgagagtaccgtgtccgcgccgacttgggtggcgcgcatcacgcagtcgcccttgagcagcacggtggccccggtcaccgggtcgcctgcggttttggagaccggcttggattcgccggtgatcatcgattcgtcgatgcgtgcctcgccggccacgatcacgccgtccgtgggcacgcgctcgccgttcttgacgatcagcaggtcgccggtgacgatggcgtcgatgtcggtgtccgtgaaatgcgccggatcacgccattcgatgccgtccacattgtctgcggaagtggcgttgagcttgtgcgcggtgcgcgggcgcagtttgataagcgactgcaccgccttgccggtgccttcgcgggccttggtctccagcaggcggccgaccagcaccagggtgatgaccacgccgaccgattcgaaatacggctcgcgcgagccctccgggaacacccacggggcgatgcaggtcaccagcgaatacaggtaggcggccgaagtgcccagcgagaccagcgagttcatgtcgggggagcggtgcgccagcgcggggaagccgaccgtgtggatcggacgcccgcagtagaacatcaccggcgtgatgagaatggcctgcagccacgggttcaccatccaatgcggcaccagcgcgggattggccatatgcagcatggtgacggcgaataccggcaacgtcagtaccgcgcccacaatcaccagcttcgtcagcgccttgatctcattggcgcgttcagccgcctctcgccgctcggcctccgccgcatccacggcggcaggtgccgtatacgaagcattaggatgaggaaggggcgtgttctcatccgagccgtcctctccctcaaccctcaacaacccatgcaccatattcatgccgcatgcaaacggatattcgcccgccggcaacgccggtagttccacgtcggtggtggcgttgcccggcagcatggcgtcaagccccagatccgcgaacaccacatgcgaagtgcattcgccggtctcctgtcgatcgaaagtcagcgtaatcggcgtacccgtgcgcatgctgatcacggcgggggagtacccgcccttgacggtgattgttgcggattggcgttcgccagaggcgtccatggccccggccgtggctttctgcattccgaagaagaaccgcagtaccagccatgtcaatgcggccgccgctatcagcgccgtggcggccgagaagatgctgagctccataaccgttccttccccttgtttgttgtactgaacaacagtgtataccctatacccctagagggtatataatggggtgtgttcagctgacggataagtatcagggggtttgcgatgcatggttatgacgaagacaaggacaaggtcatcgcacgattgcgccgtatcgaaggacaggtgcgtgccatcacgcagatggtggaggatgacaaatactgcatcgatatcctgacgcagatttcggcgtcgaattcggcgctgaaatccgtggcgttattgctgctggacgatcatctcaaccattgcgtgcggcaggcgtcgattcagggcggcgaggtggccgatgaaaaacttgcggaggcttccgcggccattgcgcgtctcgtcaaatcgtgacgagttttaccgtcattcaccatcgatgacatactgggtaccatgtttgagcaaataggaaccgtgattatcgtcatcgtcgtgctagtggttggtgcagggcttggcctcttcgccggcttcgtgctaggccgtcataagggtcaggagatggctcgaggcgtcaaaagcgaggagctggaggaggccaagacctcgctggagaatgcgcgattcgagaacgctgagctcagtgctcgcaatgctgccgcgcaagctcagattgaaggtgtgaaccagcaactggctttcgccaagtcacaacttgcccaggcgcagcaggctgagcagattcgcattcagcaggaacgtgagcgtgcagctgcggaggcagaacggaagcgtcaggcggatgctcaggccgccgaggccaagcgtgctgaacaggaagcacgtttgaaagaacagagcaaggtgctcgaggcgcttgcgccagtggccaagaatcttgataccttgcagaacaaggtcacgcagatcgaagagggccgcaagagggaaatgggcgcattgggagcccaactcaaggggctcaacgatcagcaggcccgtttggacaaggaaaccagttccctgtccgccgcgttgcgcaacaacaaggtgcgtggcgcgtggggcgaggcccagctcaagaacattgtcgagtccgccggattgctggaacatgtcgatttcgacacccaggtggtggtcacggatgccgatgggcgtacgttgcgcccggatatgatcgtgcatctgccgggaggcaagaccattccgattgatgccaaagtgccttatgccgattaccagcgtgcctgcgaaatcccggacaccgccagccccgaggatattgcccgccgcgatgatttgctgcggtcccatgccaaggcgttgcgcgagcatgtacgtgctctcggcgaaaaggcctattggagtgcctttgatgtagcacctgattttgtggtggccttcatccccaatgaggcactactgcaggccgcgctcgaagccgatcccacactgatggatgatgcgttctctcgcaaagtggcgctcacctcgccggtcacgctgtgggccgtgctgaaatccgtggcctatgcctggcagcagcagtcgctcaccgatgacgccaagcagctgttcgatttgtcccgagaactgtacgaacggttctccacgctgggtgattatgccatcaaattgggcacccagattaccaagacagtcagcgcctacaacaagttcgcgtccagtttggaacgccgtgtgttgcccaccgctcgcaagctgcaaaaaatcgaaccgaccaagatcatcgaggaagtaccgatcatcgaatcagataaaggcaatgtgagcgaactgtccgcccctgaagtggtgccggccgatgaaggtgatactcatctgactgcctcaggcgatagtctggagtcatgactgaatctggattccgccccactggtaccccggaccttgccgtcgcgaagagccataatgactttgccatgctggagccgcgtgaacagctagccaccttgctgaaggagcatgtggtgggccgtccgttctccgaacttgccgcggtgactttcgaccaccgtgccgccactgtcatgggccatgtactgattgacgctttggaagatgcgggctattcgattgatgacttcgatgctgttggtgccttgaccgcagcatctgtgcccatggtgtctgccatgatccaggccgccgcctctcgtggcgaggacttagatggattcgtgatggacttcgtctacccgtccatcaagggcccctccatcgaaggccgccgtgtggtgctgttggatgcttggctgtccgaaaagtcgtacgtgcagaccagctcgctggtcaccctgcgcaacggcaatgagctgagcctcgactttggcatagtggagcagctgggtgccaaggtcgtggccatcgcctcgctggtcggtggcggtgccaaagacatcaatgtggtcaacccctccaccggcgacgagcaaacgctccccttcatccaggtcttcgacgaatccgaactgcggtaaatccacctttgacttccctcgcataaagtcagccgggctgagcagcgaagctgactaagaggaaccggtgaatagcgttatcgaggagaaagattgcacgcacccaaccagatttctttggctgccaaagcttcaggtgaaccggaattccgtgaaatcggccttgggccgtggtctgagacccatcccggtgagcctcgtcccgatgatccgacttcttcgaattatgacggccgtttcgactcggtgctgttgaacgacggagaccgccgcaacgtattggaccgttaccgctactggaccgttgctgccattaaggccgatcttgacgctcgagggcgtcacgacttcgaagttgcggtggaaaactggacccacgattttaacatcggttccatggtccgcaccgctaatgccttccaggccaagcgcgtacacattgtcggtccacataagtggaatcgcaagggcgcgttgatgaccgaactgtaccagcacgtcgaacaccacccctccatcgccgaactggtggaaagctggcatcatcgcatcgccggtgaaatcgcctatgaacgagccaaggccggtgccgccgccatccatgcgcatgatgtggctgtggatggagacaacaagcaccttcatgagctgctggccgaaatcgatgcttgtgatgcgcgcatcaaggagcttcaagccgcccgcgtcatcgccctcgacattattcccggcgcagtgccgatggaaacctatgccttccccaagcggtgcctgctgctcttcggtgcggaaggccccggattgagcgagaaggccctcgcattggccgacgatgtggtctacatctctcaattcggttccgtgcgctccattaatgcaggcgctgcggcggccgtggccatgcacgcatggattgcccaacacgccgtatcaggcgtgtagccatgcgccgacaatcctgccgcatggatcggcggtctcatcgtcaccagaaaagcggatatcaaataatgacccgagtgcctgccctgctgaaagggtctcaaagggtaggaaaatgaggcttcccgacaactgcgtgtcacatacggctcatatagttatggccatgccaacattttcacgcgaagaaatcgtgcatttgggcgatctggcccgaatcgcgctcaccgatgaggaaatcacccgtctgcagggcgaactgaacgtcatcgcagactccatcaacaaggtccaggaagtcgcctccgacgatgtgccgccgaccgccaacccggttccgctggaagcctacctgcgcccggacgtcgccgaaaccccgctcacgcaggaagaggcgctcgccggtggcccgaagaccgaggccggcatgttcgtggcaccgcgaatcctgggaagcgaggagtaatcgatgagcaacgaaaccgcaactctcgtcaaactgtctgctgccgagcaggctgctgccatcaagaagggcgacgtcacctctcgcgagctcgtcgaagcccacctcaaggtgatcgaggccgccgagccgtccatcaaggccttcctgaaggtttccggcgatgtggctctcgagcaggctgacgccttcgacgccaagtccgccgaagacaaggccgccctgcctgagctggctggtgtgccgatcgccatcaaggacatgatcgtcaccaagggcatcgaaaccaccgccgcctccaagatcctcgagggctgggtgccgccgtacgacgccaccgtcatcgaaaagctcaaggccgccggcatgccgattctcggcaagaccaacctcgacgaattcgcccagggctcctccaccgagcactccgcctaccagaccacccacaacccgtgggataccgagcgcgtgcccggcggttccggtggtggctccgcctccgcagtcgccgcattcgaggcaccgatcgccctcggcaccgacaccggtggctcgattcgccagcccggcgccctgaccggcaccgtgggcgtcaaacccacctacggcggcgtctcccgtttcggagccatcgccatggcctcctcgctcgaccagatcggcccggtctcccgcaccgtgctcgactccgcactgctgcaggagatcatcggtggccacgacaagcgtgactccacctccatccccgaaggcccgcgcccgatggtcgccgccgcccgcgaaggcgccaagcgcgatctgaagggtatgaaggtcggcctcatcaaggaactcggcggcgacggcttccagcccggcgtcgaggcccgcttcaacgaggccgtcgacaagctcaaggagatgggtgccgaggtcgttgaggtctcggtcccgcacatcggctactcgctaggcgcttactacatcatcatgccgtccgaggtcagctccaacctggcccgttacgatggcatgcgctacggcctgcgcgtgatgccgccgaccggcgtgccgcagaccgccgccaacatgatggcctacacccgtgaagccggcttcggcgacgaggtcaagcgccgtatcatcctcggcacctacgccctgtccgccggctactacgacgcctggtacggctcggcccagaaggtccgcacgctgattatcgaagacttcaagaaggccttcgaacaggtcgacgtgctcgtggcccccaccagcccgtccaccgccttcaagttcggcgagaagatggacgacccgctggccatgtacatgaacgacatcgccaccattccggccaacctcgccggcgtgcctgccatgtccatcccggccggcctgtccgacgacggcctgcccgtcggcttccagttcatcgccccgcagcagcgcgacgaagtcatgtacaagccggccgcggccctcgaagccgcgctggaagacagctggaacggcccgatctggaacgacctcaagaccccgtggcttgacggtctgggcaagtgagcatcggaaggaaagaaacaacatcatggctgaaaaactgatgaagtacgccgatgccaccaagaagtacgatgtggtcttcggtctggaaacccacgtggagctgtccacgaacaccaagctgttctgcccggcccacatcgagttcggtggcgagccgaacaccgagctgaccccggtgagccttggcctgccgggaagcctgccggtgatcaacaagaccgccgtcgattacgccatcaagctgggtctggccctgcactgcgaaatcgccgagtggagccagttcgcccgtaagaactacttctacccggacatgccgcgcgactaccagatctcgcagtacgacaagcccaccaacggcaacggctacctggacgtcgagctggaagacggcaccgtgttccgcgtgccgatcgagcgcgcgcacatcgaggacgacgccggcaagaacacccacgtgggtggcgccgacggccgtatcgaaggtgccgaccactcgctggtcgactacaaccgtgccggtgtgccgctgattgagatcgtcaccaagccgatcgagggggcgggcgaccgcgctcccgaaatcgccggtgcctatgtgcgcgccatccgcgacattgtgcgcgcgttgaacatctcccacgctcgtatggagcagggcaacatgcgcgctgacgtgaacgtctcgttgcgcccgagcccggacgctccgtacggcacccgttccgagaccaagaatgtgaactcgttccgcggcatcgagaagaccatccagtacgagattcgccgtcaggccgctcgtctggacgacggcaaggagattctgcaggagacccgccactgggatgaggctacgcagaccaccgctggcggccgtctgaagtccgatgccgacgactaccgctacttcccggaccccgacctcgtcatgctccacatcaccaaggagcacatcgaggagatgaaggcccagatgccggaaatgccgcgcgagcgccgcaaccgcctcaagtccgagtggggcctgagtgatctgcagatgcgcgacatcctcaacgccgacgccctcgacctgattgaggaaaccgtcaaggccggtgccaaggctgccggtgcccgcaagtggtggctgggcgagctttcccgcgaagccaacgccaagggtgtgtccctcgaagagctgccgatcaccccggccgatgtggccgaggtcgagaagctcatcgcctccggcaagctcaacgacaagctcgccaagcagaccgtcgaaggcgtgcttaagggcgaaggcactccggatgaagtcgtcaagaagcacgactacaagatcgtcgaagacaacggtgccatcgaggcggccgtcgacgcggcgttcgaagccaacccggacgttgtcgagaagctcaagagcggcaacatgaagccgatgggtgtaatcatcggtgccgtgatgaaggccacgcgcggtcaggccgacgccaaggccgtcaccaaggtcgtcatgggcaagatcaagggctgattagattcactggctcccgctggtgggagctgtcgaacggagtgagactgagggtggtcgccatgtacggatgaccaccctcagtccgcttcgcggacagctcccgccagcgggagcacttatttgtagggaaattctccagttcaaatccgttagacagctcccgccagcgggagcctttattgattctgtaagaaagtcgactcagagcatttccagcgttcacccagtcgagtaagatatgttcggcactggaccgtgagccgaaacaagccgaaccgggggatgtataccgatgaccgcaaccaacgagacgctgagcatggctaccgaagcgcaactgaagcgcgatctgccacagagcatcgtcattccgccaatccgtggcgaaatggtgcacctgcgccccgccaccgtcgaggacctgcctcgtttggatgaacttgatgccttctatggcgcatccaagatcacaggtaaggatgcggtcaccgaacgcgccatcgtacacacgtgggtccgccgctcccaggcttgggaagccggtcaggcacccgccgaatccggtgtgggtgatccggaatcccgccgcaccatcgcatgggccgtattgactgacgccgaccatgatgatgacggtcagctcgatgcggccagcaccgataatgtcatcggcatgattttccttatcgacatcgacggctggtccaagtccgcccgcatccagatcatcttgggccgtgaataccgtggccgcggctactcccgtgacgccatgccgcgtgtgatgacctacggtttcgcgcccgaaccggccggcctgggtatgcaccgcatctgggtgagcgtgccggaaaagaacagccgctcgatttcggtctaccagtcgctcggcttcgtgccgtccggcacctcgcgcgacgcgttgtgggatgccgaaaacaacaaataccaggaccttatcgtcatggacacgttggccgacgagtacgatccgattcgttcgcttgacgcttttggcatgcacttgattgaggacaacccgggtgtcaaggaagcgctgtccgcgcgcgagcattccatcgccatccagcagaacaagccggaacccgagccggcacagcgtggtgaggcagccgccgccacgacgagtgacgtgcagtcccaggcccagacgccggcggccgcacagccagtcgagccacaggccgagcaccacgacgatacgcagaagaacacgcgccacagtctcgaagaggaaagcaactggccgtacggtcaggcagaacgcaagccctcaaaggaagcatggtggcgtacgctgggccgcggccgcaaacgcgatacggaaagtgagtgagtaaacaagcatgagtgccgaggatctcgacaattacgaaaccgacgccgaactcgcgctgtatagggaataccgtgacgtcatcaagctgttcacctatgtggtggagactgagcgtcgcttttacttggcgaataaggtcgatttcaacgtgcgttccgctggtcaggacgtgtatttcgatgtgcagctgactgacgcatgggtatgggatgtctaccgttccagccgtttcgtcaagtccgtgcgcatcgtgaccttcaaggacgtgaacgtcgaagaagtccagaaaaccgatatcgacattcccgacgatattcactgacaggcaatcgtctgatacagcctgtattgacaatgcgcggcattccgtcatcttacggcggggcgtcgcgcattgttcatacaacgcatagcaaaagttcagattcgtaaccttgccatcgtgtgtcttgtttgcttgcggctgatagaaaatgctgcatgaacacataccatatgcagcagggccttaagggctccattgcgggcgtggttgctgccgccacattgctggccggtggcattctgaccgttccgcacgccatggctttggaggccgatggccagtattacagcagcaagcagccatatgtggcacctagcgaagcgaccactgccagctatagccaggcgccggaaggctacgaaacggtatacaccgagtcgatggctcgccacggttcacgcggcctgtccagctacaaatacgacgcattgcttatgaagatggccgaagccgccgaagcggataacggttttaagtctgatgccatcaagtccgaattcatgaagaatctcaaagccatcaccgccgcaaatgtggagaatggctacggtatgctcaccggtcagggtgtcgaccaacatcagggcattggcgcacgtgcctacgagcgcaacaagacgctgttcgacaacgcagccaaggacggtggcatgattgcctatcagtcctccggcgaagcccgcgctactgaatcaggcgagaattttgctcgcggcttcaacgcggcctcgaacaatgaactggcgaacagcactgtaacgcccgccgatccggccggtaccggtgaagcagcggctttcgacaagacgccgaacacgctgtacttccacaagtccgaaaacccggacggcactgagaaaaccggtgaggccaagcagcgtgccgacgattaccagaacttcgtggaaaacgatgcgattatcgcaggcgctgagcaaaccatcgccgaaaacgaggacatgaaaacagcctctcacgatttgctttcacaaatcttcaccgacgacttcctcgccaaactggccgacggcacatacacttggtacaacactgccaacggcaccaagggcggcgaagccaactgcgcgccgggagccgaccccggcaaggataccgacgcctgcggcgaagccaagaagaagatcgcctccgaatacgatgccgcgatggatctgtacaacctgtacatcatcgccgccgacatggagaacgagaacaccggcagccataccttcgacttcaaccagtacttccaaggtgagcaggcagacgacgccaagttgttcgcctgggcgcttgacgccgaggacttctacgagaagggcccgagctacgccggtcaagacaagacctacacaatcgcacagccgctgcttgacgatttcttctcgtcgattgatgagcgcgtaaacggcggatccaccgttgctactttccgctttgcccacgccgaaacgatgatgccgttcgccgcgctgcttggccttcccggttccacccagcaggcggccgccagcaccaccgacgtgtacacctacgccaacaatgaatggcgcggtgaatcggtgactccgatggccgccaatgtgcagtgggacgtcgccgtcaaatccggcaacgacccgaagaccggccgtgcctacacgccgctcgttcgtatgctctacaacgagcaggaaatcgccttccgctccgaatgcacgccgattgccgatggttccacgtggtacaagctcactgagcttaaaagttgcttggcctccgaccaccaaaccctaggcgacgatgcgcatctgactgatgattccacaacgcagccgggcacaggacctaacactggtgaaggaacgagtaccactccgaataacaatggtgcgggaactcatcagcccagcaacactcaggctaatggtacggaaaacgagttgagtcgtactggtgttgccgttactggtgttgcggggattatgatgctgcttgcacttgcaggcatctcgctgaatctatggaaagttcgtcgctgacgaattagcctaagaccaaaccgattcgccgcgctgtgtgtgacgcaacgttgccgaatacccctacctcacgattcgatgcgtcgcctttctgctgatggaaagacggcgcatcggtcgtatatcgggagaattctgtaagcattcgctcatctttcggtgtgcgattccggggcttctagtagactgtctctgattttgcgtttataaggagcataatgaccgacaagcaatccgtagtgattatcggcggcggtccggctggacttaccgccgcatgggaactcatcaaggacggcggtgccgacaagtacgacgtgaccgtgctggaggggacccgcgaattcggcggtatctcgcgcaccgtgaagcacaacggcaaccgcatggatatcggcggccaccgtttcttctccaaagacgaacgcatcatggattggtggaagaccgttctgccgttgcagggcgcaccctcctatgatgacaagaagctcggccgcgaccacgacatggagccgggcggccccgatccggagacggaggacaaggtgatgctcaagcgccaccgagtgtcccgtatcttctggaaccgccacttcttcgattacccgatttcgctgagccccaacacgttgaaggccatgggcttcaagctcaccatggtggccggcttcagctacctgaagtccatgttccacaagctgccggaagacaatctggagaacttctacatcaaccgtttcggccgcaagctgtattcgatgttcttcgagggctacacggagaagctgtggggccgccacccctcccagatctccgccgactggggcgcccagcgcgtcaagggcctgtccatcatgggcgtgctcaagaacgccttccagaagctgctgcccaagaagcgctccaacgcggaggtcgagacctcgctgatcgaggagttctggtatccgaagtacggtcccggccagctgtgggagaccgtcgagtccaattgcgaggccgccggcgtcaaggtgctgaccgacgccagggtggtcgaggtccgccagaccgatggtgccgtgtcttccgtggtgtacgaggattccgagggcaaccgcaccgagctttccggcgaccagttcatctcctcgatgccggtcaaggacctggtcaacgccatcgacgcggccggcgccgatcccgaggccgttgattccaagcccgccccggccgatatgaccgaggtggccaacggcctgccgtaccgcgatttcgtgaccgtgggcctgctggtcaagcacctgaagctcaagaacaccaccagcatccccaccctcggcaatccgccgatcgtgccggactgctggatctacgtgcaggacccgggctacaaggtcggccgtctgcagatcttcaacaactggagcccgtacctggtcaaggacgtggacgacaccgtgtggatcggtctcgagtacttctgcgaggagggcgactcgttctggaacatgagcgaggaggatgtcaccaagttcgcgatttccgagctcacccgcatgcgtgtgatcaacggtccggacgaggtcatcgactcccatcgtgagcgcgtcaggaaggcgtaccccgcctacttcgacacctatgagcacatggacgagctcatcgagtacctcgacggcttcggcaacctgtactgcgtgggccgtaacggccagcaccgctacaacaacatggaccactccatggccaccgccatggaggccgtcggcaacatcaagaccggcaagacgtccaagaagaacgtgtggtccgtcaacaccgaaaagtcctaccacgaagaaaagtgaataaaccttgttgagctccctcgtcacagagggagcttttttggttttcggcgggccgttttgcgttggtcgagttggcgttgtacagtgaacgaagttcgcagagactcagagacgcagcgaacattcatgagcggtgcaaccgcaataatcactcttaacgcctggataggcatgggtctgttcggtatggaaagggcaaccagtggcaaatagccagaatcttgaggatatgaagctgcctgagctcaaagagctcgctaaacagatgggcctgcgcggcacgtcgaccatgcgcaagcccgagctgctcgccaccctgcaggcggcgcgcaatggtggagagccgccggccggtgtgaccgtgcgcgcccccaaggccgccaaaaccgccaaggtcgtcaaggctccgcagtccgatgccgctgaggccaacaccacagacaatgctgacgtggccacccagtcgccggctccggctccggctgccacggaaccgcagctcgatttgccgcttcccgtggccgacgatgccaagaaggacgagaccgaaccgcgacgcacccgtcgtaaggccgccgatgatgccgcatccgaaccgcgtgcggcccgccgtcgtcgcgatgacgaccagcccgatttcgctcgccgcaagccgcgcaagaaggccgatgaggccggcgatctgctggccacgctcgatttgggagatgcagcgcctaccgagcgtcgccgcgagcgtcacgaggacgtggaagttccgctgattcgccgagtccgtgatgatgcggacgagcagcctcgccgccgtcgtcgcactgcggaaaacagcgaagaaaccgtgcgtgacctcgacgatatcctggccacgctgcccacgcagaagcacgaggaaacgtccgaagacggcgagcagaacgacgatcacgagtttgtgcgtcgtaaccgccgcgaccgtagcgatcgcaacgatcgcgatacccgtaatgatcgcagcgatcgccgtaaccgtcgcatgcgtggccgtgatcgcgacaacgccgatgatgatcgtcgctatgatgatcgcgataatcgtagcgatcgcaatgaccgtgatagccgccgcgaagagccgcaggaggatttggtgccggtggccggcatcgtcgacgtgctcgactcctacgcttttgtgcgcacttccggctacctgcccggcccgaacgacgtgtacgtttccatgggccaggtcaagaagtacggcctgcgcaagggcgatgccgtgcatggttcgattcgcgccccgcgtgaaggcgaccgccgcaaccagcgccagaagttcgtgccgctgcaggccatcgattccatcaacggccaaagcgttgaagaagcgctcaaccgtccgcagttctccaagctcacgccgctgtacccgcaggagcgtttgaagcaggagatcgccccgaacaagctcaccggccgtatcatggacatcgtttccccgatcggcaagggccagcgtggcctgattgtctccccgccgaaggccggtaagaccatcaccctgcagaacatcgccaactccatcgccgccaacaaccccgaggtccaccttatggtggtgctcgtggacgagcgacccgaagaggtcaccgatatggagcgcacggtccagggcgaggtcatttcctccaccttcgaccgtccggcctccgatcacaccacggttgccgaactggccgtcgaacgtgccaagcgtcttgtggagctcggccaggacgtggtcgtactgctcgattccatgacccgactggctcgcgcttacaacatcgcagcccctgcctccggccgcatcctgtccggtggtgtggacgcgcaggccctctacccgccgaagaagttcttcggtgcggcccgcaacatcgaaaacggcggctccctgaccatcatctcatctgcgctggtggaaaccggctccaagatggacgaggtgattttcgaggagttcaagggcaccggcaacatggaactgcgcctgtcccgcgagctggcggacaagcgactgttcccggccatcgacatcaacgcttccggtacccgccgcgaggagctcatcaccaacccgcaggaactgccgattatctaccgtctgcgtcgactgctgggcggcatggagcccgagcaggcctaccagacgctggtgccgcgcctcaagaagaccgccaccaaccgcgacttcctcgccgccatcgtgcagcaggccaacaccggcaacgcggtcaacggcaactgatcagaccgctgaacaatagtgtaagggctgcaccctgattgatacggggtgcagcccttgtcgtatatgatgcaaatacatcaactatcacattgcagttgtagtattgccgtcaacgttcacatgcacgctgacgatatatgagatgaaagagacatcactgggttcgattgttctgggagtgggcagtggtgtggccatgttcggcgatgcggatgccagccatagcctcaccggcgactatgacatctgagatatctgactttgcgcatcgtgcaaagccgtaatcgggagtatcctcgaatctatgagcgaaacgagcagcgactggcaaaggaccaccatcgactccgcccaggcggcggcccacccggaaaccgcacaagcggtggcgcgcatcaaagcgctgcgccaaaccatcgataacatcgattcggcggtcatcgcattactggccgagcggttcaaggccacctcgcaggtcggcgtgctcaaagccaacgccggattcgcgcccgaagacaccaagcgtgaggactatcagatcgaacgtctccacagcatcgccatcgatgccgggcttgatccggaaattgccgaaatgtaccgtgaattcgtggttaccgaagccaagaagcgccatcagcgcatagccgatgccggtggtgacccgggcgtactcgacgtattcgcctgattcgcccgcagcgaatgggcacctttcggatattcgtctatagggcaagttgcctgcagcgactacattaatacgggaatggaatgcccgtagtggtcgactgtatgaatgggatacgtagatgagatgtggtgccgcactggtcagttgcgcattgtgcgtggcttcgattctcggcggtgcttggatgtctcgtccgactccggttgattacggtccggtgctcgctacggcaagtgatatgtacgccgtcaccgatgccgaaggggagccggtccgttggtatgtggtagggaagggcggcgccggcaatggcgccagtgccgattccggcaatagcggttccactggtaccgattccgccaatagtaattccggcacgtccaaggtttctcgtatccccgcttccgccgccaccctgccatggaaagtcagcgtcacctactcgcttgacggtccgaacgtcgaggcaaacgaggttgccggcgcgtctggactgatcggcgtgtatatcgatattaagccgcaaaccaaggaagccaaccgtacgatcccggttgtcgcctttaccgtgcctacgcaggtagccgatgatgtttccgctgacaactccattacggtgaccacgcaaggttccaataccgtagtcgccgcagctggaaaagccgcaaccggcttggaattcagctgctatatgaacgccaaagacttctccatgagctccgtggcgctcgccgtattgccttccaattccagcagtccggcagttggtgctaatcccgatgccgcgaatgctgcgaatgctgcgaatgctgccgcacagcctgctgccgatacggatgtcgcccaactcaccgcctctgccgccacactggtcgattcactgaccgacgccggttctggcgaacagcaacagctcatcgagcagcttcaaaccctgcgcgataacgaacgtgcgctgaacaagtctgtagtggccgaacgcgaaaccgcccataagcggacgtttgaagactatatggccgcgtatgtgggctcatataccacgcacctgtctggatcgattggcacctccacccagttgccggcgttgatgggcacggccggcgaactgtccggggacacgcctttggctcaagccgtactcgacttggccaacgcggtgaacaacgtcagtgccgcacatcagcatgccggtgcggtcgatgcattggacgaggtgattcgccgcatccagcagcaaggcaccaccggactggtggatgatctgatcgccgaggcttcggaggaagccactcaaggctccaagcaatacgccgatggccagagccagctctccgccgcaatgattccgtattcgatgaaatacacggacgtttacacggccaatttgagcgccctgaccggcggcacgtcctcgggcgccaccgcttacgagagccaagccatcgccgaaaccaacggtagcgatgaactcgccgacgctcaatccaaggtcgatgccgcgatgagcacgcttgccaccgcctccgagcatacgggcaaagccacggccttgcgccagattgtattgcgattctccgatcagttcgaaggcggcgcgtcctcggcttccggcagtgatggtgatggttcgtccggtgatgtctcttccgatccggtgaccgaggctcaggcactgaccggcctggtcgattcgcaatcgcaatcgttctacggcaagacccgggtcgcccaagccaagcgtaaggccgatgccgcccgtaagcaggccaaagccgcgcaacagcagcagtcgcaacattccaaggcctcactggtcgatgacaccatgtccatgtctgctggcgatgtgatgaactatgcgggtggtcttacttcggccatcggtggtggtggtaagtccgactcgtctaagagcgctggttcgggaacgaacgactcagccaagtcgagcgacactggcgattccggcaacaatcttgacaccgctccagtactgttcggctttggcactggcggcacgctgctcaagcacgatatgaacgcgctgattaatgagaccgtgaaaatcagtgatgctggcacgctcttggcgcaggccgtcgcgcagctcgacagccccaatacgcaacaaaaaaccgccgaaacccgatatctcatcgtgattccgacggtgtgatggtgtatgcgggatatttgcgtgccgtcccacagtcgtgtcatccgaacgtcaaaaaacaaaagaggggaacctcaataggttcccctcttttgttgttgtgcgtaacgttcagtgctttggcttcttggctggccgagccgttaagcgggaagcccggtgggcttcccgtaggctcggaacgagcggcattgccgtgagacctactgttgttgtgcgcaacgttcagtgctttggcttcttggctggcggctcaccgagctcgctggcttcgacggcgacctcggtttcggacgcgtcttcggcggcggattcctcggcgtgcttggccaccaagtcgaacttgccgaccacgcgaccggcctgcgcgatatcgcccaaggcggcgtgaatcgcttccacaccttccgaagcagcggacagtgccacagacaggattggggtcttcatggagaccttggcctcggacttgatcttacgcagctgctccacggccttgccggcccaagtcagcagctcgggggaagcaccggtggcggcctcgacatacgggtccacgaccggccaggcggcgcgatgcacggaaccggaaccggcgtgcatccagctccacacttcctcggtggcgtacggcaggtacggggccagcagacgtgcgaaggcgtccaggcccagacccagagcggtgcgggcggacttcacagccttctcggacggcacattgccgtgctcgtccggagtgccataggcgcggttcttgaccagctcgatgtagtcgtcgcagaactgccagaagtaggactcgatgacttccagcgccttggaatgctcgtaggattccagcgcctcggtggcctgacgcaccaccaaagccagcttggccatagcggcgcgatccagcggttcggtcacatcggccgggttccacgcggcctcggcggcagcgcccacgtgatggttctcgtcctcacggccgatggccagcgcgaacttggtggcgttcagcagcttgatggccagtcgacggccaatcttcatctggccgatgtcgtacgtggcatcgaggcctaggcgagcggcggcggcccagtaacgcacggcgtccgcgccgaacttctcgatcggctcgttcggcaccacgacgttgcccttggacttcgacatcttcttgtggtcggggtccagaatccagccggacagcgtggcatgggcccacggcaggcacttgttctccaagtacgcgcggtccacagtcgagaacagccaggtgcggatgatgtcctgaccctgcgggcgcaggtccatcgggaaggtggaagcgaacagggccttggaggcctcgtccggctcggcccagtgggtcacgatctgcggggtcagcgaagaggtggcccaggtgtccatgatgtccttttcggcggtgaaaccaccgggcacatcacgctgggactcgtcgtagccctccggcacgtcgatggtcgggtcgatcggcagacgatcctcggacggagtgatcgggtgatcgtaatccggctcgccggaagcgttcaccgggtaccacagcgggaacgggacgccgaagaagcgctgacgggagatcagccagtcgccgttcaggccgtgcacccagttctcataacgcacgcgcatgaagtcggggtggaactcgagttccttgccacgctcgataagctcggcgttcagcttggcgtcggtaccgccgttcttcaaataccactggcgggaggtgacgatctcgagcggcttgtcgcccttctcgtagaagttcgtcatacgcttggtcggggtcggctcgccgtccagatcgccggactcgcgcagcttgtcgacgatgatcttgcgggcggagaacgtggtcttgccagcggtttcggcaaagacctcgcggccggccgggtcctcgatccagtccggggtatccatcacgatacggccgttgcgctggatgatcgggcgggtgggcagcttcaggtcgcgccaccactcgacgtcggttacatcaccgaacgtacagcacatggcgataccggcacccttgtccatttcggcggccgggtgcgccagaatcggcaccttgaccttgaacagaggggagtagacgtactggccgaagtactgcttgtagcgttcgtcgttcgggttggcgatcagcgaggtgcaggccgccagcagttcggggcgggtggtctcgatgtagatcggggtgccgtcctcaaagcggaaggccaccttgtggtagaagccggggtattcgcgcgattcgagctcggcctgggccacggcggtctggaaggtcacatcccacaggccgggggcgtcctgctggtaggcctcgccacgggcgaggttgcgcaggaaggccttctgggccacacgctgcgggtgctgaccgatggtgtggtaggtctgcgaccagtcgatggacagacccagcttgcgccacagggcctcaaacagcttctcatcctgagcagtcagacgctcgcacagctcgatgaagttcttgcgggaaatcggcacctgatccttggcgtcaatcttcttgccatcagtgccttcaaacggcggcttgaagtccgggtcgtaaggcagagacacgtccacgcgcacgccatagtagttctgcacgcggcgctcggtaggcaggccgttgtcatcccaacccatcgggtagaacacgtcgtagccgcgcatgcgcttgtaacgcgcaatcacatcggtgtgcgtgtaagagaacacgtgacccacgtgcagcgaaccggagacggtgggcggcggggtgtcgatggagtagacggccttgcggtcgcgggtgttgcggaatttgtaggtgccgtcttcatcccagacggtgcgccacttgtcctcaagtccgtccacgccgaccttgtcgggcagcggggtgaggttggcgttgatgatggatttgccttcagtcataaggccaaagtttatgcacgttgcatgacaagccgaactgtacagtaaacagcccagtaggctgttcgcaggcgaggtacgaacgatcgaacgatagtgagccaaggactatcgggcgtagcccgtccgtgactgaaggttgcctacttcaccgtcaacccggccagcggcatgcggcgattgatcatcgaggtcgggtagccggagaccttggtggacgccacagtgaagcatttgcgggtatacagccaatcactggccgcatcctcgctgatcagccgggcgtacgccttcattcgtgcctcataatcggcgtcattagtggcggcgcgagcatccgcataggcctgttgcgcttcggtatggtcgtaatggaacatggaatcggggtcggcgaatatgccggcatcatccgtgccgtccatgctcatcacggtcagttcccatttgccgtccttgattcgtttggcataatcctcatcggagagcacttcaaggttcaccgtggggcgcggctgccgctcgatctgctgcttgatggtttcggccaacgaccggtattcttcgggaaccaccagattcaccgtagtcaggtattgcgcaccaaagtaggagaacatctgcccagcttggttttcgtcatgcgggtacagtccggtcaaatcttcgtatccgggttccagcgggctgatggggccgcccaatgctccggctgcgtcgggttgggcggaggcgatgccggctgcgtcgatttgatagcggaaggctttacgcgcctgttcgtcggagagcagcgaatcggtgccgttgttgtaggccagcagcaccttatccgtagtggccccctccttgacggtcaggccatccttgccgttcaaaccggtggccgtcgaagccgaaaccggtgccgccatatcgagactgccgtcggtcagggccttgctgagcgcatcggcgtcggagtattgcataaattcaacgacattgctggccgctttggtgccatggtaggtatcgctgcgcgccagcttcagggaatggccaggctggaaatcggccacggtgaatggtccggaacctatggccttgcgttgataatcggcactggacgactcggaatcgtagacaatgccgagtctgccggacagcgctcgcagcagcgtcggattgggcttggcaagcgtaatgaccaccgtggtggcgttcggattggcgaccgacgccagattgcccaattcgtcgacgttcgccaccttgttggtcacgttctgttgcaacgaccacacggcgtccgaggcgtccaacgtatggccgttcgagaaggtgacgcccgattgcagtgtcagggtgacggtcagtccgtcatcggaagtcttccagcttgtcgccagtcccggctgaagcttgttgttttgatcgacggtcactaatgtctcatacacattgtcgacgagcaggcgttcggctgccgcagaggaatcggaccgaatatccaaggattgcggcatatcgtcgatgccaatggtcacatcggcatcgagggacgatcccggctggaaccggttttgcatgaacgtccatcccacaaccacgagtgcgccgagtgccacggcgactccgagaaaaatcccccacttggaccatgtattgtcccgcttgctgtgctgcatggttttcagtctagcggtggattcagcctagaatccgcaattcaccatgatgaggtatgagttagcgcttggacgtgctcttgccggcgggcggcgcatagctagggcaggtgtcggacagcgggcagttggcgcagtcaggggtacgtgcgtggcaggtggcccggccgaacagaatcagtcggtggctgagattcgtccactcttcgggcggaaaacaggaggtgatttccttctcgattttcacgggatcggggtgtgcggaccgccaatccgaccgccaacgcagtcgtccggttacgcgcatcacatgcgtatcgaccgggaatccggggatatcgaacgcgttgccgagcacgacgttcgcggttttgcggccgacccccggcaagctggtcagttcatccatcgtgcgcggcaccacgccgccgaatcgttcgtccagtgccgtggccagtccgatgagatgctgggttttcgaacgatagaaccccagcggatgaatgatgtcttcgacttgggccgggttcgcggccgccaggtcacgggcggtggggtaggtggcgaacagttccggggtgaccgtgttgacacgcttgtcggtggtctgggcgctgagcacggtggcgatcagcaattcgagcggattcgagaaatgcagtgcgcaagcgggtgccggaatcacctggcgcagaatgtcgtattcgtcatgcatgcgcgtgagacgcgcggatttggtttctctcatcgtatggacctaagcggcgtaatgtcgatgattgatagtttgcagcgccgctggtctgtcaggcgacggtgttgagatcgggagtatcgtcatcggtgtcgatggcggcagaggatgctttggcggcctgctgtgcggcggcagtttccttatccgtctccggcgggtcgaatcggtagcccacgttgcgcacggtgccgatgaggtgttcgtattcgccgccgagcttggcgcgcagacgacggatatgcacgtcgaccgtacgagtgccaccgtagtagtcgtagccccatacttcctgcagcaactgggcgcgcgtgaacacgcggccggggtgctggaccaagtacttgaggagttcgaactccttgtatgccagatcgatggggcgtccatgcagggaggcggtatagccgttggtgtccacaatgaggtcgccggagcgaatctggccatcttccaccgtggtggtggattcggcgggagaaccggctgctgcggctgcgggagcgttgccgcgctcggagaccaatcgcaatcgaccctcgacttcggccggggaagcggtggcgaccaccacatccgcaatgccccactgggagttgaccacggtgaagccgccttcggtcagcaccagcacgattggcgtggacaggccggaagcgtggatgaggcggcacaaggttttggcggtcgccagatcatcgcgtgcatccagaaacagaatggtgttctccggcatcttcaccaagctggctgcatccatcggcagtacgcggacgcgatgagaaagcagggcgagtgatggcaaaacggtggcggggtcgctggcgaaagtcatcaacgtaagatccgtcacgctaatcccccttatcctgcaatgtgttacgcaattgctcggtgtggctgtacgagtcgtcagcggcgttatgccgctttcgcacggttttcattattctacgcgcttgtagtggacacataggttacaagtttgcggaatatggaacggcagacgtccatcaaccgatgacacggccgagcaccagtgcggttgcggcgatggtcacgcccatcagcattaccggcatcaggccggtaccgatccacggatagcggatatccgggtccggatcggcgtcacgcacccacaacgtggaggccacggccaaggccagtcccaaaacgatgaggatgatcagggcaacggttcccgcaacggtgcccttggcgagcatcgcgcccaaatcaggcaggaagcaccagccggccacggcgagagccgccacacctgaagtcacggcgtgagagagtgcgcggataagatggtcccgcttctcgcgggccatctggcgcccgaaggagaagaccaccagcaccaccagcagcaggcccatggccagtgcccatgaataccaaggaagtaccgagccatccgcagcggtctgatccggcggaaccttgccggtcgggaaaggtacgatgacgaaaatcagagaaatcgcgccaaacaccaaagtgacgatacgatccagcatgctgccgcggaacggccagaacacgacaaatgcggccaacgtcagagcggcgataatcaaagggatgatggggacggtgccaggggagggaatgaccgtggctgcgatgagcagtacataggacgtcagttgggccaacaacatgctcagggctttgttcttccaaccctcctgggtgatctcggtcatgatacgcctctcagataatcgaatttccatcccaatcctacgtcgggcattggaacggtgaaatcaaacaaaacagccctttctggtgaaggggcttatgacactaaatcagaacgcgataacgcccaaatgctccaacagcactttgacgccaagtagaatcagcaccacgccgccggcgatctgcgccggctcctgccagcgggagccgaacgcgcggccaatgtacaggcccgcagcggaggacagtccggtgaccacaccgatgctgaggatggcgaatgccatatgggctttggtgaacatgaaggtcaggctcacgcccacggcgaacgcatcgatgctgcaggccacggccaggggaagcatatgcttccaatcgaactgggcggtctccttggagttttcctcatcttcttcgaaggcttcgtgaaccatgttgccgccgatgaacaccaacagggcgaagatgatccaatgatcgaattgggttacgtatttgctgaatgtagatgccgcgaaatagccgagaatggggaacagcatctggaatccgccgaaccagagggtgcttttcacggcgtcttgtactcgtacgcgggatacggtcaggcctttgccaatggatacggcgaatgcatccatagctacggaaacagaaataagcaggatttgaatgattatcgaaatcatggtgtgacagaaggttcatcgccggattaccgtgcgatgggcctcgaccagcgttcctacacgccgcctacgcctagttgaaaagacaaaacattactgtatcacaaaatacaagctccctctgttggggagctggcgcagtgaaactgcgactgagggagagtagagcggctttgccacaaatacaacaaaaggcccccgaaggggcctcctgtcaacgattcagaatcgaatcacttctcggaatcggcgagacgctgacgcgcggcaatgatttccttttcggcggcgtcagcaccagtccagtagtcgcccggcaggacttccttgcccggctccagagccttgtactgctcgaagaagtgcttgatttcggccttgtggtactcgttgacgtcgtcgatgtccttgatgtcatcgaaacgaacgtcggcgggcacgcacagcaccttgtcgtcgccgccggcctcgtcgaccatgtggtacaggcccacggcgcggcactcgaccacgcagcccgggaacacggagttcggaatcatcacgagagcgtccagcggatcgccgtcctcgcccagagtgccgtcgatgtagccgtagtcatccgggtaacccattgcggtgaacagggtacggtccaggaagacgcgaccggtctcgtgatcgacttcgtacttgttcttggagccgcgcggaatttccacaacgacgttgaaggtttctgccatgtcatttctccttgaaaatcgacagttacgttatcgtctcaccacaataccctgtttacgcctgcaaaacaggtgcggaactcaagaaaccgtgctgagattatgccgacactatgcccaaacagacgaaatcctccccttgaggggaggatttctagcggtttacgcgcacgataaacccatgcacgtcaacggcatcactgttgcattaccgttgcagtaccgcatcactgcacggacaggatgtgggccacatccgcccaaggagccagagacacgtagttgtcccaaccccactggaattcgcggccggtcagctcgtcgcgcacgttgagcgggcggtcggtgggcagacccagctcgctgagttccaggtgaatcatcgactggtgtgcgttgtgtccatcgaggttcacgaccacaatcagcgtgtccgcttggccggtaccggtcagttcggccggcgtgtggcgtgcgaaagccagaatattcgggtcggacgtaggcagcacggtgaggttgtggtagctcaacgcggccgggtgggcgcgacgaatcttgttgagtgcggtgagcatctcggccacgccgtactgcttggccttgctccaatcgcgaaccttgacctcgtacttctcgttgtcgatctgctcttcgaagccggggcgctgcttgttctcgatgagttcgtaaccgttgtagataccccaggacggcgagcccatggctgccagcaccgcacgcacgcagtggccggctacgccgttgtctcgcacgtaagcggtgagaatatccggcgtggtgggccagaaggtgttgtgctggtagtagccgtcgtcgccattggtgaccggcagatactcttccagttcgtccttggtgttgcgccacgggaagtagcagtgggactgggtgaagcccacgtagctcagggcgcgcatcatgcccgggcgggtgaatgcctcggccaggaacaggatctccgggtgcttcttggtcacggcggcaatcacgtcctgccagaaacgcaccggcttggtgtgcgggttatcgatgcggaagatggtgacgcccgcctcgatccacagattcatgatgcgttcgacttctttttcgatgccaggcatgtcggcgttgaagtcgatcgggtagatgtcctgatacttcttcggcgggttctcggcgaaggcgatggagccgtccggcttgtggcggaaccagttcgggtgggccttgacccacgggtgatcgggcgagcactgcagggcgaaatcaagcgcgatttccagacccagttcatgtgcacgctggcacagggccttgaaatcgtccatggtgccgagcagtggatccacggtgtcgtggccacctagctcggagccgatgccgaacggggagcccgggtcatcggggccggcgaccagcgtgttgttgcggcccttgcggttggtcacgccaatcgggaagaccggcggcaggtagacgatgtcgaagccctcggcagcggcgcgttcgaggccggccatcgaagtcttcagcgtaccctgaatgatcttgccggtgttcggatcgatggtggcgccttcggaacgcgggaagaactggtaccaagccgcgaagctggacttcgggcgttccaccttgaagcgctggggctggctgggggagatgccgtcgcgcagcgggtgagtctcgtgcagggcggcgatggtcgggttgtcgccggcggcgagacgatcctcggcgctcagcgtctgatcggccatggtctcagcggccttctccaaggtcttgcgatcgcgtgcggtcaggccggtgtccggggtttcggcccaacgggccagcaactcggcaccggaattgagtgcgttgtccacgtcgtccatcacacgcaccttgatgcgggcgtcgtgcagccaggagacgtacgcgtcttcccaaccttcgatggtcacggtccattcgccgagctgacgcttgacggccgcgtagccatcctcccaaggcttcagatcgctgtgctcgccgcacttgaccatcacggtccaacgatcgaggccgggatttacgcaggtcatggcccggcgcatggtttccttgccgcgcgggttgcgcacgatggcggtggcacccaccttggtacggccttcgatgaacacctgggcggtcatctcaaacggttcgccgagttccacacgggcggggaagatgccgcgctcctcggcgggagtgatgtccatgacattgatgcggccgaactggccgggctcgtttgcttcgatggacggtgcgggggcttcgacagccaggcctttcagcgctgctgcggcgcgtgccgtttcggcgctgactctcttgcgcttggttgcggggctctttcgggcagaagtcgcctttgacttcgttttcgtggtgctgttatcggtattactagtgcgcgtggtcgcgcgatgttgtactgctgccataaggccctattctaagggcttttgaacatatgttgcgcattgtggataactatcaggtaaacgttcggtcaaccgcatgaggtggataactcggcggaagagttatccacaactcgccggcaaacggcaagctcggaccacataggtcgaaaaaccggctgtagcgaatgaaaatctgccatgatcgtggcctacccgcacacagtgcagtatgcggggaaacgtaccaggaaaggacgaatgatgataacgacatggcggcaacggggcatggccatcgtagcgatgctgaccggtctgataataatggtgggagtggtgttcggctcggcgaatacggcgtatgccgcgacgttgacgcccgccgacgaaagatatcacgtggcgtttccatacaacgatatggaatattacgtcggtgtcgcggggctggacgcttcgggcaacaagtactactgcatcgaagcggggaaactgagcgactatgtgataggccccaccacggtgcttgcctccgatgagaacgcccggcgtatggcatggatccttgaccggtaccgcgacacggatgccgccacccatgcggcgatcggcatcatcgtgcaggatcacttcgggcgcgatcgggacgagtgggcgagacagatggcggtcattcaaggccggtaccccgagatcgtggcgaaggcggcccggatatgggatcaatcggccggcaagacgcctgcgggcacgacggtggaacgcaccgatgccgaggctttgcgcagcggttccatctcggtgaaagtggtgaaccgcgccggtgacgcgatcgcgggagtgccgttcaccgtcaccttgcagggggcggcgcggttcgtccaaggcggcaacacgttctcgggggtgtcgacgagcgccgggtcctcgatcgcgtgggaggcgaccggcgccggcgaggtgacggcgaacaccacatacgagtatgggcggatgcacgtcatggacagcactcaggacatgctggcctttgactcgatggcttccactggcggcgcgtcgacgacatttcgggtgcgtaaggattttgttccggcggtatccaccaaggtctccgagaaggtgcttgatgtggcttctccggtgttcgatgacgtgaccagtggcgtggcggatgcggacagttattgggtgcccgatttggaattgcaggcccgcggatactatttcgatggtcttgatacgggcgatgtgggcaatgtcattacgccgaatgcacaagagagcgccgatgcttttcttgcgcgattggcgactttgggttatgagccggtggcctatggcaaggcctctttcaccggggtggggcagcaggcacgtgtgcaggccatgaccaagccggatgacggtgccgcttaccggaccaagcagaatagcggttttggcacatgggtatgggtgtttcggcggtccgagcagagcaaacaggcgcaggaataccttataggcgactggataagtccgtttatggaggctacggaaagcaatacaagtcgcaggaagctagaagtcatgtcgacggtcactgagcattcggcggatatcggtgccgagctcagcgacaccattaccgtatcgggattccctgcggatcatggccagtatgccggcaacgaagagtatgagttcgcggcggatcggccgtatgcgacggtgagcgtatggtggtccggcgatcccgacaacccctccaacgatgaggcgtacaagccatccgggggagaggttcccacggaagacgacaaccaccggttgctggccacctgggagattcccgcgatgaacggcacgttcaaaatcggcgccggggcgttggacgcgcatggcgctcctatgtatctgaccgccgaacggcctgggtggtacgtgttcgtctggcggttcgagggggatgaccgtgtttccccggcgtccagccggtatgacgatgcctgggagcgtgtgcgggtgttgcccccatgcgagtcggagaaaccgtgcgaaccggagaaacccgagacgccgccggcgccggcggaggcaaccacgcccaaccctcgcccgtcactgcccgtcacgggtggcgatgtgtcgcttgcctcggttctggccgtgtcagctctggcgataggcgccatactgtccatcgtcgttcggtggcgtcgtcgctatgaccgattcaagcactggacgatgcgctggccgatacgttgacccgctgcggcatgatgccgatgatgtcggctggatggtgaaccgcactccgcttctgagcagaagaacgggagctgggcacgaagtcgatcgtaacatacgacttgtgcccggcttccgcttcgttgagaaacttcacgcctgtcgcctcccgtggattagacaactgaagatccgcgatgaaaatgacgagacgtttatgatcgccgacttccctgggcaccgtagctgcctgatcgcctttcatccatatcgccacggtaaacggaaaggccgctgatttcggtaccgaaatcagcggccatataaccacgttcgtagcggggcatggatttgaaccatgttcctctggcaacatagtgtgccagaggaacatggttcaaatccatgccggccgattatcggcttatattctagcggcgtagcgtgctggtggtgtgatggtgaaccatgagcatgaaacgaacgccaccgccggcgtcatgggcggaagacatcaatgattggcttgaatctctgaaggcggccggtctcagtgacgaaacggtgcggtgccggcgctgcaagataaccaaggccgcacgtgatctggcaaagacgcctttggaagtcacggctgaagacatggtgcattggatggcggcgcagaaatggaaaccggaaagccgcaagggataccgcaacacgctgagcagcttctacggatggctgtataccaccggccggcgtggcgacgatccgagcgacgaactgccgaaaatcaaacgaccgaaaccaaagccgaggccatgcccagacaagtacatcatcgccgctctgcacaaggccaccgagcgtgagcgggtcatggtcagactggcggcggagtgcggattgaggcgcggcgagatagcgaaggtgcacagccgcgacgtgatggacgaccttttaggcaaatcgctgataatcaccggcaagggtgacaagcagcgtatcgtgccgctgccggacgatctggccgattacatcgagcattgcggcggatggctgctgcccggccgatggggcggccatgtcgagcaaagctatgtcaaccggcatatctcgcggttgctgccggacgggtggggctgtcacagcctgcggcaccggtacgcgacgaagacctacgagcagacacacgacctgttcctggtcgcacgtctgctcgggcattcgtcggtggagaccacgcagatttacgtggcgatgcccgacagccgtctgcgtgccgcgttggatgcggtcacgttagtcggctagtcgtttggcgagttcggcggcgacttgttcgccgaggcctgtcttgaggctgtcggcgagtttggcgagctggtcgtcgctgatgccctggccgttgatcttgccgacgacggcgaagaggctgttgaggttgttgaggatggcgggcaggtagtcgtagggcattttctcgttgatggggccgaggcgtttgctcagggcgtcgattttggcgatggcgctggtgttctggttcatcagcgcctggagcatgtattccacggtgacggtctggccgccgttgggcaggttcacgggatcggttttggctggcatgtcgatacctcctaggttgttgtcgtaatactgttgcgcgcgggccatgtaggccgcgttctggcttcccgcgatgcttgccgggcacgcggtggccgagaaatggttgtgggggaacacgtttcgcccccattcgggccgtccgagctggtagcggcggcataatgcggccacgagtcgcgcgccgctggcgagtgtctgttcgctgatggcccacgggttcgaggtgatgtcggcgtgctcgatgccgatgctgcgctggttcgccgcgaggtcgccggcgtgccatgcggtgtcctggtcgttgacgagcctccagaccgcgccgcccgcgtccacctggtagtgtgcgctggccggccgggtctgccacacgttccagcagtcccggccggagaggttgcccgcgttgtggtgcaggacgatgtattcgacgcggtggcccgcacggcccggcgtgtagtgcttgtccagcagcagggtaacgtcgggggtcagcgtgctgtagtccatcacttgccccctttctctttttcggagcggaacaggtcgagcagggggctgtcgcgcagttcggggttgagcgcggcgatgttctcgatgatactcgagatttccgtgatgctgatgtacacggcggcgggcacgatcaacggcagcgcgaagcccatgtcgagccacgtttgtccgtgttccacgatctcggccaacagcatgacgagcacgagcccgctcttgtgccacaggccctcgcgcatcttctcgctgctgacgtcatgcgcgtggacggccttcatgaggccggtcaggtagtccatggcgatgagcacgcccacgatgctcaacgccgctacttctgttgctcccattgtttttcctttctgtctatttcgcaacgtaggtgagggagaatcccattttctcgttggcgttgaagaccacgtccgttcgggccacgatgttcaggccgccctcggtcgtgatgttcgccgtgaggtggcggtcccagtagccctggccgttgactatcgccgggaagatgagggtggccgccggcgcgggcagtttcccggcgtcgagcagttttcgcgtgttgcccgtgttcatcgaccatttcgtgttgtagtacgcctccacatgcacggtgactacgttggcgctgcgcgtcacggtgatggatcccagaagcgcgtatacgttgagggtctgcacggtcgaggcgacgcgcgagctcagcgcgtcgagcatcgtgccggtcgcatacggcagccatgcgctgccggaccagtaataggggccgttattcgattcggtggggtcggcggtgacgtagccggtctggccggtcacgccggtgatgccggccaacgtttccaatgtggtggcgatgacgggtttcacaccggccggggtgttgcggttgtccacctcgttgagcgccgtttccacgccgttggccatgttggcgaactgttcgggcgcgccgcttacgaggtcgttgccttcgaggtaggggattccgtagatcggtgtggttttcatggttggattccttcccagtttggttggtcgaggacggcgggctggtcgtatgcgctgaccagtccgagttcggcgaggctcatggcggtttgcgcccatgtgggcggccatgcctgcatgtcggcccatgtggcttggcggtcggtgtcgagcgggatgggccatatggtgacttcgttgcggaggatcggtgttttgccggcccattcgaaggtcagggtgccgccgatggcgttgtatgcgccggcggtggccggtcggtcggtgtcgtcggtcagggtgccgcttcgggtgccttggagggtgaacgcgccgggtggactggtcttgtagagttcgggccggtcggcggggtcgattttgcggccgtcgaacacgatggtttcgggggtgagtcgccggtcgatggtttcgagccatgttgcggcgtcgatgcggttctgttcgcttggcgtccatgtggtgccgttcgcgcggctgaatatgccgcccgtgtcgtcctgggtggtgatgtcgctttccagggtgaggcttgactgggtggaggtcaggttctcgggcagtgttccgcggtctcccatttcggtttcgtcgtcctcgaaggcaagcacgccgtcttcgtcggccgtggctttcttcgctttgagtgtgatttgggtcaggggttcggggatggtcagggtgaggtcgtcgtcggtttccaccagtggtgcggggatggctggggtgacggtgtcctggtcggtgatggtcagggtgccgtcggtggccgcgcccatggccacgggccggttcagtggcgtgtattcgatcacgctcgtgtccttgtgcgggacctcgtaccacaggggcatgtgggggtggtgggcgtagaggcggtgcaataggtcgagttgggtcgggtagtcggacgtgtcgtaggatgcgggggtgccggtggtttccagcccggccgcgtcggcttctggcgcgccggcctcgcgtgcgcgcgtgttgagttccgcgagccgggcggcgacggtggtggtgacccagtgttgtccggcccatctcgcgtcggtggatgtggggccttgtttggccaggcgtttccagagcagcaggcggctggacgcggtgagtttgagtttccacccggttttgtgtgcggtcgctgtgccgccgttgctgatgatgccgtcgaacagggttatggtggtgctgtcgggattgtccggggtgggtggcgcgtatgcggagtgcagccggttcaacggcatcctttgtaccttccatgtgcccatcgcgtccgtgagcatcgcccaggtgggttgttcgctgatctgcacgaggatgcgtgcgccggcgagggtgagcgcgcggccggtgagccatcccctgaggtcgcgcagggtgaagctcatcacgctggggtcgggttgctcgtcggcggtctccacgccccattgcacgctgaactgggcgagcacggcgatgtcctgcaaggggtcgttgaggcttttccagccgtcgccccagtcgatgaacatgaatggtttctgcatctatctcatgcccgctttctgtcgtagtcgcggaggatcttcttgagtttgcgggccgcgtcctcgccgtccagcacgccgttgatgacgatgctcacggtcatgggttgcgcggttgcggtgccgttggtgccgggcatgtcgaatgacatggcggacaggcggccgttgacgcgggtgatggcgcgggtcacgtcctggtcgaagccgaggccgaggcccttggcgaggccctgcatgatgaggcggccgtttctgatgagcagcgccttgtcgtatgcggcggggcctttgtgttccgcgatccagtcggcgatgcctccgatgaacccggtcacgttgtcccatgcggccttcaggccgttgaggaaaccgtcgatgatgttctttccggcgttgtacagcaggctgcccacgttgccgatggcggacaggatgcggccgggcagtccgctgaaccagctgaccacgttgttccacgtgttctgcgcgaactgggcggcgctggagaagaacgcgcctatcctgccgggcagtgattggaagaatccgatgatgttgttcacgcacgagccgatgaagctggtgaagttgctccatatctgccggccgctttcggtctgggtgaagaagtagaccagtccggccaccagggcggctatgagcgtgatgatcagcacgatggggttggcgttcatggccgcgttgagcgcccattgggccacggatgcggccgtgttggcgatgctgaacccctgcaatgcggaggatacggcggtgatgacgcctgcgactttgaacacggcgaagccggtgccgatgccgaccagggcggcgctgatgggttccgcgttcgcgctcacccagtcggagaacgcggtgagtttgtcggccacgtcgcccacgatgccggccgcgccgttgaaggcgtcgcccagcgcggtgccggcggcggacgcgccgccgaacgagtcggtgagcggcgcgaactgggcgagcacgtcgccggcggctccggcgaggcttttgcaggtctcccacacgtagccgaagatgtcgctggcggtctgcaccgggcctgtgtcgttgaacgcggtcatgaagtccgtcacggcggttttcgcggtgtcgaacgtgttggcggcggtgtcgcgcacggtgagcaggaagtcggttatcgggctgtcttcctcgatgttgaacgcctcgcgcagttccgcgctgaagttgccgtccctgacgagggtcatcacgcctttcaggccggttgtggccttgccgctgaacgccgtgatcttctcggcggcgacgcccatggcggaggtcacggccggtttcacgaggtcgaaggcgtcggtgaggccgccgaccacggacgcttcgaggttgcccatcgcgccttcgatggtcttggtgctggtggcggcctccttggccacgtcgctcatgccgagctggatcagcgcctggttgaactcgtcggcggtgatttcgcccttggccatcgcgtccctgaagttgccggtgtacgcgccgttggcgagcatggcctcctggagcttgcccgaagcgccggggatggcgtcggccagctggttccagttctccgtcgtcagctttccggctccggcggtctgggtgagcatcatggcgacgcttttgaatgtgtcggagttgccgccggccacggcgttgaggttgccggcggcttcggtcagttcggtgtagttgccgatgccgtttgcggcgagctgggcggtggtgttctggatcgtggtgaggtcgtacacggtgtcgtccgcgtatttgcgggtggccttggtggcggcctccacggcgctggtgtcgaggcctgcgaagctcatggtgttcttgaacttgtcggtcgagtcgctcatctccacgaccgcgccgctgaagttccggagcgtgtcccacagggcggtcacgcccttcaatgccgcgccgcccatgaagctgccgaacgcggcggccttgccggtcgccttctcgaacgccttcacggcgtcgttcgcgttgcccgtgatgcgcacggacatgatggcgctatgccccgccattgtccacctccttttcggctcgttccatttcctctgtcagcaggcgtatgccggtgccccagtcgagttcgctggcctcgttcctccattgccacggggtgccgccgaagcggcgggcgaggatgaagctgagtcggccgagcgaatcgtcgggccacgcggctagttcgtagggtccagctgcgcgtcctccgtgtcgtcgggcgtgttgatcaccacgtcgatgatgctgtcaagccactgttcgtaggggagtttggtcttgccctgctggcgtgcggcggtgtaggcgaagtagtagacgaaccggattttgcagttctccacgggcccccacccgttggtctgggcgtgttcctcggcctggcattgggcgcgggcggtgaggatcacggtgtcctcgtggccgtcctgatagcagatggtcgcggtcttcttcaacatggcttatgctcctttgacttgtttcatggttttctccacgaacgcctcgtatggtttcatccaggcgttttcgcttcgggccacgccgttgttcacgtacaggcgtggtttgatgtggtggccgggccacccgtagttgacggggccggcgtagggcacggccttgcggcccgcgcggatcacgccggcctttttggtcgcgccggcgcgcagtgatttcgagagtctgccggtcttgccgacgggggcgagggcctgcacggcggggagggcgatttcggccgcttcgcggttcacgcccttgagttcgtccaggtcggcgccggccttgcgcatggtctgtacgaaccgtttctggccgacgaccataagggccttgccggtgttcatgcgctggccggggccgtgtaggtggtgtgcttgaggttcgtgacggggaagctgaagtcgttggtgttcttcgatttcacgtcgccgccgacggccacgggggtcacggtcacgtcgccggtccatttgatggccccggtcttgttgggtacgaactcgaacggcagggtctcgttggcgtggtcgaagcaccacacgctcaggccctcggcgctgaagtcgtcgccgatggtgccttccatcgtccatgtggtggatgtgttggcctcctgcgatccgtccagataggtggtggggtcgtcgctggaattgctggggttgagctgcgccttggtcaggtcggcgctgaagtcgcggccgttcttctcgtcggtgatgttgaacgagccggggccgagtgtgcgcaccttgcttgccatgatggttcctttcagatgatttccaataggttgagtgtgagctggtaggcggcgaggtcccccgcgccggagaggctgagggtcacgggccgtgccgcctggatgttgagctcgtgttcggccatgaggtcgatggcccgcatgacgagttccaacgcgggggcctgggtggccatggtgccggcgattatgtcgagcctccacgtgatgtcgggctcgttgccccatttcttgtaggtgagttcgggcggttcgatgaagacggccaccttgttcggcagggggcgggccttctgctcgtctgccgtgacgatctgcacgaggtcgcccaggcagtcttcgagcaggcgggtgagcgcgtcgcgttcctggatgacgaggctgctcatcatgccaccgccagactgccggccatgacgcccacggcgttgagtttggggtacacgctgcgcagcgggtcggtggacacgcggaacggttcgagcgtcgaatcggcgacgctcatcacgccgaaccgcgcgtcacgcgagttgtagaggtcggcggcgcacgacacgatgcagtcgcggcgcacgtcgtcggggcatgtctggccggcgatggcggcgtccacgtaggtggtcgcggtccgtatcttcgcggtcaggcgttcggcgtcgccggcgggcatgttcacctcgtcgcgcagcagggccacgagttcgcttgtctcgtccgtcatggtcaggccgcgaacttgatggggatcaggcccgtgggcagggtggcggcgacggcgaggtagccgtaaacgctgtagctgtcggtgagcttggtcgggtcggtggcggacagctgggtggggccgccggattcccagacggtcacggcctcggggtcgatgaagcaggcggtgccggccggcgcggcgggcagcatctgcacgggcaggcgcaggaagcggccggcgatgccggtcaggtcgaagtcgcccagtgtgtcgctgccgtcgccgctcaggtcgaagaagcggctgccggagtccttgagggccacgagcgccttcatcacgtccttgctgacgccgaggcgggtcaggttgacgttgcggtcgtcggcgatttcggcggcgtcgatgatgaggccggcccactggtcgatggtcatggcgttcaatgcggcgggcgcgtcgagtttgttgggggcagtggatgcgtcgcgctgggtggcgatggtgtcgtagaggaactgacggaccttgttctcggtggctttcgcgtaggcgttgcgcagggccttcagcgcggtgttgagcatgggcgtggtcgagcgttcgatggtctggcgcgacagggtggtgtagccgccgtaggtgcccacggtggtcaccttcgtgccgaacgacaccttgccgaacgcgagcgtgtcgccttccttggcctgcgccgtgacgctggtggtgtcggtctccacgacgttgtattccatgctcatgccggtggagggcaggctgtcgtgggtgaggatgcccatgaccttgcggcgctgttcgatcagtcgcaggtcgtccgcgatccaggtgctggtgttgccggtgttgccggtcacgatcaggtcgcggccttcgcggtacaggttcacggccgcttcgtcgccgtccacgagggcacgcaggtattcgcccgcgttgcggtattcgccgcccatcgtcttgcgttcgggtgccgcgcccttggccagcgcggccttcatgccacgctgttcctcctggatgccgtcgagcatggcgcgcagttcctcgtccatgtggttctccttctggttgtcggtttggtcgtttccggtttcggacatgttttcgtgggcttgttcgcgctggccggtgatgaccgcgttcggatacgcggggatgccggtgacggccacctcgaacagatcgaccttgcgtcgatgcacctcggtgacgccgtcgtcggcggccacgttgcggttgtccacggggatgaagccgacgctgaacccgtcgtagacgccttcgcgcacgagttggatggcctcgcgcgcggcctgggtgccggcgagcttcgcggtgatgtgcaggccgtccgcctcggcgtccatgctggtgacgcggccgatgagctcgccgtgctgccggctgattttcacgctgtcgcgcgagccgaagtcggtgtccgggtcgaacacctcggcgtagtcgccccatagggcgtacctggtgttgaacggcacggcgatgccggtcaggatgctgccgtccccgtcttccgcgtcccttacctggatgccgcgcacgtcgagcgtgcgccgttccatcagtctgtcgttcattgctggttctccttcactggttccggcgtggatgccaacgggggcagtccccggtcggcgcgcacctcgtccacggtcatccactggtgttccaaagcgctggcgtaggccgcgtaccgttcgctggtgttcgtgcggccgctcgaatcccagtcgaaccgcgcctcgcggccgcgcggcagaagacggttgaacagttcctcgatctcgcccgcgtaggcggccagcgtgtagtccgcgaactcgatccagctttgttcgatgttctgataggtcaggttgctgccatcgacggccgcgagcatgatggacgcgggaatgcccaacaatcgcgcgatctgggtcgtgtcgaacttctgggtctccagaaactgcaaatcggcgggcttgaggtccaagggcacgtatttcaggccatcggagacgaaacgcacctggccggcctggccgtccttgccccagtcgtccttcaacgccttcaacgtgggaaggctgaccttctgctcggtggtcacatagcccttgatgttgctggaatcggtgtagaacttggccttgtagtcgcgggccatctgcgcggactcgacctcttcgcgggccgcgccgatgggtcccaagcccctgagccgtccgggcacgttgaggaacttgcagtgcacgatgtcgtcgggcgtgtagtcgcggccgagatagccgtagcgcaggcgcgggctcgcggggtcgtggccgtcgtcgctgacggtcacgagctgcgggggcagcacctcgcaggtcacgatctcgccgccgtatctcaccaggcggatgaaggcgttgccgtcgaggaccatcgaggccactatgtcggcgaggaagtcacggcgtgaacggttgatgtcggggcgctggacgagcgcgctgacggtatcgagcttgatgccgttgcgggtctcgttgatcggcaggccggtgatggctgtctgcagcacctgcacgccacggaacacggtggacagggtgagcgggtcgcattccgcgcggcgggccggggcaggatgccgtcgggcacgtcgtcgagcgcggccgcgccacgggtgacgatgccgcccgcgagcttgagcctgcgccagaatccaagtcgttcgttcatgcccacaagaatggggccgaaggcggcgggccgtccagcaccgtgaagccaagcgaagccaagcgaagccaagcagcgccatcagactatgaacggcgtggtctcctcgggctggtgggtcgctccccatgcggccaacatgcagctttcgagcggcgacgtgaggccggtggagccacggcgggtgatgcgccatgcgtcgccgctccacgtgcgcgcgcttttggccacgctcatgtccagttccgtgtcgagcgcgtgggtcacggtgtggttctgcaagccggaaacgtaggcctggccgaccgcgaggtagtcggcggcggagagttccacgaacctcacgagcgggtcgccgtagctgtcggtgagcgatgcgagccggtcgcgcaggtcggcgttggggccgcgcgtgtccatcacgagcggtgccgcgtagtcggtgcacaaacgggttatctcgtcgggggcgttgccggtgccggccagcaccttgagcagttgggtggtgacggtgccgtcctggttgacgatgccgacgctcacgctggtgttggtggcgtccacgtccacggcggccgcgaacacgatgggccggccgtcgagctcggcgggcttgatcggcgcgacggcggtggtctcccataggtcggccgctatcaccctgtcggaaacgccggtgtcgcgcctgttgccgaacgcgcgcgcccaaccggccacgttgtcgccgaacccctcgcggaagtcgcgcaactggggcttgtaccacaggtagccggcggcgggatggtagcgcatgaccacgtccaggtcctcggggtcggcgtcctcgggtatcccgaaatcgaaccagcaggtgcgttcgggcacgtccccggcgcgcaaaccgtccagcagcgggttgaaataggtgctgtcggcgttgccctcggtcgaggttatccaccgttgcgcggccacccctgtgcgcatcagacgagtgttcatggtcggtattatggcgtccatgatggtgtccccggactctttcgtcagcgagaaggcctcgtcgatggtgaccttgtccatctgcttgccgtggccggctatcttggtcatggccatggggcttatcgtgctgccgttcgtgaagctcacgctcatgccgccgttggagaaccggaacttacggaccttctgcatcaggcgcgtgccctgcatcagttcggcgtactccttgaaatggtcctcggcgtccttgccggtctgtgccgcgtaggcaatgcgccggcggcggccaagtgatgcgttgaacgtgtccgacgagtccaccagcgcgctcttgccgcactggcgcggcgtgctgatcactatggtgtcgtaatggaaggtgccggtgtcttcgtcgatctcgcaggccacgtcggccacgtagcgttgccacgggatcagcggcgtgcccatcatggccgcgatgcccgccaatcgcggccccaacgtcctgcgcgtctcgtcgcgccgggtgccgcccctaatcagcatcgccggcacctcccgaccatgcggcctccacgtcgtcgtccgcgacgacctcggcgggatacatgtcgcgaatcttccataaagcgtcgatgtactgcgccatgttgcggctgatttcacggcccgaccggttctggctgtcgatgttggccgcgagggagagcatggcctggcaaagaccatctcggatggggtcgtattccgggtgcgattcctccaagtccttgacgatgcggcgcgtggcctgctcctgcgggccgatgttccggccggtgtcctcgtcgaatccttcgagcatcatgcgttgtttgctccaatcatagaaaaggtgtatcttgtgtttttgaagagcgatacccggaaaacgttggaatatcaacgttttccggcttttttattcttgggttggggggagaaaaaactgggcgcggggtcttggtcgaagccggcgagtttaaaaaaccgcgttcaccactcaggccgcgccgcgacgctggcggcgtcggagcgaaggcccaaggccgtgagacgggcccgccgggcggcctgccttgcatccaccagcgcctgcgagagatgcagcgagtaccatcggcgcaccagcacgcgctcgtcctcggtgaccgcatggtcccatgcctcggcgtagtccacatccatcacgtgtatgtcgtagtccagtgccagccactcgtccagcatccgcgggtgccggcggctggacgggaacgtgcgcacgcaccacacgtccaacggttccgcgcatgtggtgaagctgcggtacgcggcgctccatgccatgcccacggccacgcgctcggcgcgcgactcgtgcgcggccacgcccatagcgtcggccagatacgagtacgccaccacagggtcggcactgcgcgagtgttcggtgatgtagtccaacgccactgcgtcgcaacccggtgggcacatgatcgtgtgcaggcgtgcgctgtaaccgtacagcacgcggtcctggcggctggcgttgcagtgcttgcaggcgcggcggatgttggccacggtcgccctgcctccgtgcgagtggggcacgatgtggtcgtcctcctcgcccaccacggtgcatcccggcaaccccagccaacaggtgttgccgtatgtggcgatgacctcggcgcgcacgcgcgggtcgatgacctgccttctgcccatggctatcgctcctttcgtgcggcgagccacatgtcaaggtcggccagctcgtacaggatcggggagttcggggcctcgccgcttcggaagtacgccggccccgtgccctggtcccgcattcgctgcatcgtgcgccgcgacacatgcagataccttgcggcctggctgacggtgagcttcgccctcggattcatccaaccccctagaacagattcaacttcgattgcatcgatgcctgcgatggggccgtctggccagactgcgcggccttgcgccggaacaccgatatctgcccctgcgcccacaggtcgaactggcgtgcgtccaacgtccacgcgccgccgatacgccgcactcccattgccggccagtcgccgccgagagctgccagttccatgccgttgcgcagatgcagggcgttaagcacgcgcggcgaatcgggcaacccagtgtgctgttcctcggccaaggtgttgatggagagcctgaagccctccaacaggtcggccgcgtcatgcggagcgctccacgggctcaacgcctcggcaaggctcggtttcgtgcgcgccatcagtccaccacccaagcccacgagccggtccacttcgccaacgcctgcatggcctcgcgcgcgtcccagcagcgcatcccgtacttgcgggtcttcgagacggggcattgcgccaactgcatcatatggaacgcctggttgtcgtcgatgcgcccgttacgcctggtcaatccggcccaacgcgcgatctgctcgatggtcaccgcgaacgattccgtggtcttccgtgattcgatgaactcgttgagcttcggaagcaaccggatacccgcgtccttcagattaatctcgaacgttgctctgctcataatccgtaatccccttacgttggtttctcatgtcccttttgggagtgaggctggagaggtcaagacccgaggattctcggccgagacgcgcaacgcgaaatctcggccgagaatcctcaagtgggtctcgctttcggtcggtcggccgccgattgcaagagcaggccgaagcctgccgggaatggtccccaaatccagccccacacaatcgcgtggtattgctgcccgattccgcctttaccagcggctggatagggtcggtggcaacctcttcgtctcacaagtaccgcagttgcaatgcggccggcctccccgtcaccacggcggggcataggtagggctaggcgtagccatacgcgccatcacagccattacattctcagtgacccgaatcagcgtcgggcacgcatacgaacgcctagaggcgtctaaagatacctagaactactcgggaccgtccggcatcattcctccttcagccaatcgccaagattcacgaccgcgagacacaccccgaagccaatcaacagcaacggcgacgccgcgaccagcaccaacgcctggcagcacttcctaaacaccctcacgatcgcctcgattcagacgggtggacacgcgctccggcacgtcggccagcaccatgcccgcacacaggcaggtgacgccgaccaatgcccacagacccatgacggccagaatcaaacccacgaacaccgcacagaacgtgagaacgcatttatacaacccgtgcatgcttcgcctccctgataaccctggcgaactcgcggttgatacgaaccatgtcacccatcgacaggccaccgaccgcgaaataatcaccatccacactgaaacggataccgaactcatacgggctgccggcatctccggtcaacttgaactccgcactgaaacggttggcgctgcattcaggatcaaacaccgacatcagcgcgcctccgccatactcggtggaatcttcggcccctcgagtgcgaaaacgcaatccgggcacatcttcgagtgcggcctcatacgccacccgcgcgccgacatgcacatgtccgggtcctgattcaacggcacgaacgcctcggccccgcacacgtcacaacgaaccacatacgcaatcatctgcaaaacctccatcggtcgaacggttgaaaaggggctccttcccccgccgtaggctagaaatcgcacaaaccagcccaaggaagaacagacgaaggaaggaagaatcatgattcccgactggatcaacgccgtcgccgccgtctccgcggtaattgtcgccggcatagcactgtggcactcgtacagaatcgacaaacagaacagcaaactgctcgaacgccagatagcaagcgaatacgtgtactggcacgtcaccgccgactactgggagtccaaacgattcacattccgcaatatcggcactcatgctgcaaagaacgtgaatgcctacatattcatcgagggaacgaagcgccttgacaatatcggtcccatcgaaacggtgccggccggagaatccttctccgaaagatccgaaaccttcctcagccgggaaggtgcaatcgggaactactacgacatgaagagctggaatagaacaacccacacggaaacaagccctcttcacatccagttcctcatcgaatggaaggacagcatgggattcaacaaccaccaagagctcacggtcaaattcggatgacatcacgaatcgcacctccgattcaaaggctccatctgaaaactgcttgcataacccggaacccaagccgccgcgaaggactcaccgccgatgcaaatgacctgagtggagaagaacctatcggatgaagattcctccttcggctccatgcaaccagaaagcccaagcaacatcgaaagcgcgagaacagcagacagaacgcgtttgcgcatcacgccacctccaaaggcttgagacccagaagggcgtcgctggggacgccgagccaatgggaaaggctgaagatttccgcatcgttgaaacgaatcttgccggtcagcttgttcgacaaggtggattcagagataccgagcatatcggcggcatccttttgggtatgtccttgtgcggctagtgtcgctcggactctccgagctaaattcgtctgaaacgaactagattcattcatggcagcttttatagcacggcgtggtgcgttaaacaagaattctgcgtgtcgtcagtgtagaaaattcgctttatgctaatcttgttcgcatgacagcagttatggaagccccgcgagcggctgagccggcagcgggcaaggcagatgatttacaggcgattgtcacgcgcaatattcgggttgcgatggctcttcgcggcgtgaatcagaaggatttagccaaggttctagggatagccacgtcgagtatgtcccagaaattcacgggtaagacattgtggaatctggtggatatagaaaaagcctccggtttcttccatgtgaaaccggaggcgttggtagcggggcatggatttgaaccatggacctctgggttatgagcccagcgagctaccgagctgctccaccccgcgtcggcttgtctctcagacagctctatctacaataggtgcagattccagaaagtcaacatcggcgtgtcgcgtcatcttcccgcggttttaaaacgtgaatcggctcacgcagcgagggatttggggcggagtcggagttggggtgataacgcgccataaatggccgttataggaatgccctgaaccgttatcccaaatattgacataataggaacatgcctatcaagatccccagtggcctgccggccagagatatcctcgattcggagcgcatcttcgctctggagaagcccgaggcggagcgtcagcgcgtccgcccgctcaaactggtgatcctgaacttgatgcctaagaaaatcgagactgaaacgcagctgctgcgtctgatttccaagtcgccgctgcaggtcgaaatcgacttcatgaagacctccacgcatgaggccacgcacgtttccgccgatcatctcgtcaagttctacgaaaacctcgatgcgttcaaagacaactattacgacggttttgtggtcaccggcgcgcctgtagagcatatgccgttcgaagatgtggactactgggacgagttcaagacgattctcgactgggcctccacccatgtgttctccaccatgtacctgtgctggggtgcgatgggcgcactgtactaccgttacggcatccacaaggtggattaccccgagaagattttcggcgtattcccgcagtacctgcaggacgaatactgcttcctgaccaatggcttcgacgagattgatctgcagccgcactcccgcctcgccggcgtgaacgaaaacgaggtacgtgccaaccatgaccttcagatcttgacttgggggccgcagtccggcccgggcctgatcgccacgcgtgacttctccgaagtgttcgcgctcggccattgggagtacggcaagtacacgctcgccgaggaatacgagcgcgatatggccaagggcatgaccaacgtgcccttcccgaagaactacttcccgcatgacgatccgaagctggaaccgttgttcgcctggcgcgcccacgccaatctgctgtggcgcaactggctcaactgggtgtaccagaccacgccgtatgacctgaccgaggtgccgcagctcagggctgagaagaagctcggtactgatcgttcgattcggcatgagccgggcgggccgcgccaggatgatttcaagccgtttgtgcatgacgggtatggggtgattcagggctgagcctacgatctcccctcagtcgcctacgacgacagctcccctcgacggggagctcctttgcttctccttcacggctcggcccatcagagggagctactgttggaggttgcgttcgtagcgtggacggttgttcgtccacgatgtggacggcttgatgaacgtaatgccacacatccgcgtaatgcgaccaatagtgcacaacgttcgcgaaacgcccgggaaaaccttgcagcagtagggatttcaggagactcgccggtataatattgacattgtctagacgcaggcaaataatcactcttcagtcattcggagccgaatgcccagcgcagactccgtgtccatgcccggcagactccacaccgaggagacaaaaaaagacgaaagtaacgagcacgtcacatttgcctgcccggtgggtttaaactgacacctgacattgaagaagcaggaggcgtgatatggtcggttcgctcagcgcaggattgctgttggctgacgaggcaggcgctcatctgccctcggttgatgacttccttcccccggagattctgttccagggaactccgtttgccatcaaccgcattattttgattcgtatcgtggcaaccatcgtgctgttggtggtgctcggcgtgaccgcaaagcgcgccaagctcatccccggccgttggcagggcgtagtcgagtacggtctcgacttcgtgcgcgacaaggtcgtgtatgacgtgatgggtgaggcccgtggcaagcgctacgtgccgatgatcaccaccctgttcttcacgatcttcattttcaacctgtgcggcatcattccaggtatgaacatggcggccaacgccacggtggtcatgccgctcgtgttcgctgtctggacactgatccagtactggatcgccgccatccgctcgcagggcctcggccactatctgcgccacgagctgttcacccccggtgtgccgtggccggtctatttcctgctggctccgatcaacctgcttgaactgttgatcatccgcccggcctccctgaccatccgtctgttcgccaacatggtttccggccaccttatggtcgccacctgcctggcgttcgcacagttctggatggttgacgcggtcaacaagctgcagggcatcccggtgggtgcgctgtggttcgccggtggtttcgccatgacctgcttcgaggcgttcgtcgccttcctgcaagcctacgtcttcgcgattctttccaccgtgtacatcaacctgagcttcccggaagagtgacgggcgactaacccgccgcttccggtccccggtctgggaaaatcgcagaccgaccaaaccccaagatttataacgtcgccaagtacgttagaaaggaaacacaatggatatcatcaccctcgcagaggtcgccggcaacctgtccgtcatcggttacggtatcggtactcttggccctggcattggtctgggcatcctcttcggcaaggccatggaatccaccgctcgtcagcctgagatgtccggcaagatccagaccatcatgttcatcggcctggctctggtcgaggtgctggcactgatcggcttcgtcgccgccctgatcatctgatctgcgcagatcaacagacgaaaaccgattatgtccatcactgaaaggagggcttgatgacacaagcagcaagcgggattgacctgttcattcctgaggtttatgacatcgtatggtcgctgatcattcttgtcatcgttgcggtgttcttctacaagttcttcatgccgaagttcaatgcgatcttcgacgagcgcgccgccaagattcagggcaacatcgccaaggcggagcaggctaggaaggacgccgacgaggccaaggccaagtatgaggcccagctgagcaccgcccgtgtggacgccgccaagattcgcgacgacgcccgtgcggaagcgtcccacatcatcgccgacgctcgttcccgcgccgagtccgatgcggcccagatcaccgcatccgcacagcgctcgatcgaatcccagcaccagcaggccatcgtctcgctcaagggcgaggtcggcgcacttgccaccgccctggccggcaagatcctcggtgccaagctggaagacaacgacgtgcagtcctcgatgatcgattcgatgatcgacgacctgggcgccaagaagtgaccgtgaccatccgtaaccagaaagggaggtgaccatgcgaggagaggcatcacgtattgcagaccgcgagtcgcgtgattcgctggccccgaaactgcgcgacacccgtgaggacgcgtggcggatcggcaacgaactgttcacgatcaccaaggtgctcgatgacagcattcagctggagcgcgcactgaccgacccgtcccgcccggttgccgacaaggtggccgtcctgaaggaactgctcggtgacaacgcgcatccgatgaccatggagatcatgactgacttggtctcccgccgttggagccgtgcgcgcgacatcgccaacgcagtggaagacttcggcgtggacgccatgatgtactacgcggacgccactgacgccacgctgcaggtatccatcgagctgtccgagctgcattccgcactgctgaacctgccggtcgtacgcgccaagctgtacgactaccaggccaccagcgaggcccgtgtgaagctgttccgcgaggtgttctctggcaagaccctgaacaaggtcaccatgaggctcgccgaacacgccacttgcaacctgcgccgccgccgctacttggagaccatccagtggctgatcaacaagttctcccgccacatgggcgagtcgatggtcaccgtgaccaccgccaccccgctgaagaaggagcagatcaagcgactggtcgaggtctactccgccaaggtgggccgtcaggtgcacatcaactcggtggtcgacccgaccgtgctgggtggcatgcgcatccaggtgggcgacgaagtcacggacaacaccgtggtcgcacagctgcagaacctgcatcgcaaggtgcagacggaggcgactccggcctgaccggccgagccaatccgtccaacaccacacacaagcaaagacttgactgaacaataaccaatagaaggagtgatcatggcagaactgaccatcgatcccgcctcgattcgcaaggccctcgacgacttcgtgtcgtcgtacaagccgagcgacacccccacccaggaagtgggctatgtcgccacggccggtgacggcattgcacacgtgacgggattgcctggttgcatggccaatgagctgctgacgttcgaagacggcacgctcggcctggcgttcaaccttgacgcccgtgagatcggcgtggtgatcctcggcgatttcgctggaattgaggaaggccaggaagtgcgacgcaccggcgaagtgctctccgtgcccgtcggcgacggctatctcggccgcgtcgtggacccgctgggcaagccgctcgacggcctcggcgagatccagggcattgagggtcgtcgtatcctcgaagcccaggcccccgacgtgatgcaccgccacccggtcgacgagccgctgtccaccggcctcaaggccatcgacgcgatgaccccgatcggccgcggccagcgccagctcatcatcggcgaccgccagaccggtaagaccgccatcgcgatcgataccatcatcaaccagaaggccaactgggaatccggcgacccgaagaagcaggtccgctgcatctacgtggccatcggccagaagggctccaccatcgcctcggtgaagcagagcctggaagacgccggcgccatggagtacaccaccatcgtggcctccccggcagccgattccgctggcttcaagtacatcgccccgtacaccggctcggccatcggccagcactggatgtacaacggcaagcatgtgctcatcgtcttcgatgacttgtccaagcaggcagaggcctatcgttcgatttccctgctgctgcgccgcccgccggggcgtgaagcctacccgggtgatgtgttctacctgcactcccgcctgctcgaacgttgcgccaaggtctccgatgacctgggcggcggttcgatgacgggtctgccgatcgtcgagaccaaggcgaacgatgtgtccgcctacatcccgaccaacgtgatctccatcactgacggccagatcttcctgcagtccgatctgttcaacgccaaccagcgccccgccgtggacgtcggtatctccgtctctcgagtcggtggcgccgcacagaccaaggctctgaagaaggtctccggtacgctgaagatctccttggcacagtaccgttcgctggaatccttcgccatgttcgcctccgatctggatgcggcttccaaggcccagctgacccgtggtgcccacctgaccgagctgttgaagcagccgcagttccacccgtactcgccggaacaggaagtcgtgtccgtatggaccggcacccacggcaagctcgacgacctcgacctgaaggacgtccttccgttcgagcagggactgctggactacatcgaccacaacaccgatatcctcaagaccattcgcgagaccgaggaattcaccgccgacaccgaggctgccctcgataaggccgtggacgagttccgttcgacgttcgtctcttccgccggcaagccgctggtcgagaagaagccggacgttgacaaggccgcgccggtcgatcaggaaaagatcgtggcgggagaaaagtaagccatgggctcgcaactcgcattgaaatcacgcatccgctccaccgagtcgttggcgaagatcttcaacgctcaggagatgatcgcgtcttcgcatatcgccaaggcccgtgatgtggccctgaacgcgaagccgtacaccgatgcgattttcgatgccgtgcaagcgttggtggcccacacccatatcacgcatccgatcgcggtgaaggacgagaagaacccgcgcgtggctgttctcgccctcacctcggatcgtggtatggccggcccgtacacctcttcgattatccgtgaaacggagtcgctgctgtcccgcctcgatgcggcaggcaagcagccggagctgttcgtgtacgggcgtcgcggttcgacgtactacaggtaccgtaatcgtgacatcgcggcgacgtgggaaggcgacaccgaccagcccggcgtggaaattgctgaaacgatctccaacaccttgatggacgcctacatgaagccggctgagaagggtggagtttccgaactctacatcgtctacaccgagttcatcaacatggtggtgcagaaggtgcgcgtgctgcgcatgctgccggtcgaaatcgtgaaaaacgagaccaaggtgcccgatcctgatgaagaggcaccggctactgcggatgtcgctccgctgtacactttcgagcccagcctcgaaaaggtactggacgcgattctgccgaagtacattcagtcccgcatccacgagtgcctgctgaccgcggccgcgtcggaaaccgcaagccgccagaacgccatgcacacggcaaccgacaacgcacgaaacctgatcgacgaccttacgcgcaagctcaacgcttcccgccaggcctcgatcacccaggaacttaccgaaatcatcggcagcgctgacgcgctgaccaagaaggaagagtaggaacgcatatggctgacaaccagaccactgcggccgagcctaccaacggtcgcgtcacccgcgtccagggctcggttatcgacgttgaattcccggtgggtcatctgcccgacatctacaacgccctgaaagtaacgatcgtcaacaccagcgccaaggaagaaggcgaggcgaaggagaccgagatcaccctcgaggtcgaacagcacctcggtgattccacggtccgttgcgtcgctctgaagcccaccgacggcctggttcgtggtgcctccgtctccgacaccggcgccccgatctccgtgccggtcggcgacgtgaccaagggccacgtcttcgacgtgtccggtaacatcctcaacaagaagccggatgagaccatcaccgtctccgagcgttggcctatccaccgcaacccgccggccttcgatcagctggagtccaagacccagatgttcgaaacgggcatcaaggtcatcgatctgctgaccccgtacgtgcagggcggcaagatcggtctgttcggtggtgcaggtgtgggcaagaccgtgctgattcaggaaatgattcagcgcgtggcccagaaccacggtggtgtgtccgtgttcgctggcgtcggcgagcgtacccgtgagggtaacgatctgatcggcgaaatggccgaggccggcgtgcttgagaagaccgcactggtcttcggccagatggatgagcagccgggtacccgtctgcgtgtcccgctgaccgcactgaccatggcagagtacttccgtgacgtgcagaaccaggacgtgctgctgttcatcgacaacatcttccgcttcacccaggccggttccgaggtgtccaccctgctgggtcgtatgccttccgccgtggggtaccagccgaacctggccgatgagatgggttccctccaggagcgcatcacctcgacccgtggtcactcgatcacctcgttgcaggccatttacgtgccggccgatgattacaccgacccggccccggccacgaccttcgcccacttggatgcaaccaccgagctttctcgtgacattgcctccaagggtatctacccggctgtggacccgctgagctccacctcgcgaatcctcgatccgcgttacgtgggccaggctcactacgactgcgccaaccgcgtcaaggcgattctgcagcgtaacaaggagctgcaggacatcatcgccctgatcggtatcgacgagctcggcgaagaggacaagaccaccgtgaaccgtgctcgtaagatcgagcagttcctcggccagaacttctatgtggctgagaagttcaccggtcgccccggctcctacgtgccggccgacgagaccatcgaagccttcacccgcatctgcgacggcgtgtacgacgacgtcccggagcaggcgttctccggcatcggcggcatcgacgacctcgaagagaagtggcacaacatgcagaaggaactgggtgcgtgatggctgcggaaaaaaccacgatgaaggtcaacatcgtcgccgctgaccaccctgtgtggcacggcgaggcgacgagcgtgaccattcccgcctctgagggcggcatgggcatcctgcccgaccatgagcctgtgctcacggtgatcaagcagggtacgctcaccgtggttgagcccgatggcgatcgccacatgttcgaggtgaccgacggattcatttccttcgactcgaacaaactcaccgtggcggtcgagcgcggccacgacgtccagtactccggcaccgccgagtgacctgaaccaactccttaaggggctctctggttttccagagagccccttttgctatgtatgccatgtgttgcgctacagtggtggcctatgcgagttattgttgccgactgttcggccgagtattcgggccgcctcaacgcctcactgcccctggccaagcgcgtattgctgatcaaggccgattccagcctgttgattttctccgaattgggctcctacaagccgctgaactggatgaccgcgccctgtacgattcgtgagatcgacccagccgccaaatccgcgcaacattcccgggaaagtgtcgctggtggggctgtggatggtgattctgcgacgcgttccccggaaagtgtcgccgctggtgagccggaaaaggtgctacgtgtcagcgccgacaagggttcggacattcttgaagtgacgctgcagcatatctattccgaccaaacctatgatctgggcgaagatccgggtctcatcaaggatggcgtggaagaccatctgcagcgctatctggccgagcaaatcgagcgtatcggcaagggagccaagctggtgcgtcgcgaatacccgaccgccattggcccagtggatattatggccgtgaatgccgagggcgagcatgtggctgtggaaatcaaacgtcacggcggcattgatggcgtcgagcagctgactcgctactgcgaactgctcaatcgagatccgctgctggccccggtgcacggcatcttcgccgcacaaaccatcacgccgcaagcccaggtcttggccaaagaccgcggcttcacctgcctcatcctcgattacgacgatatgaaaggcaccgaggacgacagtctcaggctgttctagatatagcaggggctccctcatcagagggagcccctgctatatcttttagtacgcggcgagaatatcgattacgaagaccaacgtggagttggcgggaatcggaccttgctccttatctccataggcctgatccggcggaatcaccagcagaacctgagagccgacggtctggccgaccagacccttctgccagccctcgataacctgatgctggccgctggaatcgctgaacagatcggcgtcgattgtggaatcgcgatcccaggacgaatcgaactgcttgccattcgtaagccaaccggtgtacttgaccaccacggtgttcttgtcggtcagcttggcgccgttacccttgatcagcgtctgcgagatcagcgaatcaaccgaaccctgaccgttcatgtcaatggacggcttgccgttcttggcgcgcgtcaccttcggcagattggccggcacatccttgacttcctcgccagtggccttctccaagtccttggacttggacacaaacgtcatcgccagaatgtaagagtacccggacgaatcctgagcgttgacgccaaagccaatcgtggtgttgatcttggcacccttgatctggttgtagtaggtcgaggagagggtcttggaatccaccttcagcgagcaatccggcgtgttcttggtccaggtgtccatgagctcggtgccgtctttaacgttgagcgcgatgccttgggcgcagacgcggtcgccctcctcgatcacgtcgccatcgcccttctgcagcaccacataagagccatcggacacggtcatcggcgtattaaaggagatggtcggcttctcgccgagcttgcccttggcggtcacgccggcaatttggcccttcttgtcagaagagtcggaagatgaagaggaatcggaagaagaggatttcgagtccgagctcgaactggagcaggcagccagcgacacgcacatcgccagcgagcaggcaagggcaacggccttgccgaagggggataacatagacttaacagacttacgcatgacacatcaccctactggtaaaccttgattttctgcgctcctaggtaataaacaggtgaagattgtagaatggttgagttatgagtgctgaagaacagactacaagaccggataagggcgccaagcgtccatcccgtcatgccaaaatcatgcgtggagtggtgacgcctatcttcggactattggccgtggcggctgtggtgttggggtacatgaatgccacgatgtggaagccctccactgaaatcaccgcttccgcaaccatgagcggctcccggtatgtcgtcactgatccgaatgtgctgaccttgttggatcagaatgccacgataaccgtggactcgggatcctctcaggacgaggcgtgcgtggcgttgggttcgtccaaggatgttgccggatgggtcgcgtccgagaagtcctatacccgcatcaccggattggcatcatggagcgagctgagcacccagaagggaagcagcacgagtcagggagcgcctaccagtgccgatgacgcggtgtcgttcaaggattccgatatgtggactgccgtgaaatgcggcactgggtccgtttcgctgaagagcaagaagaccggcgcctcgacggtagccattgtggatttgggcgaaaatgtcaccaacgccaaggtgcagctgcactgggtgcgctccgaagtgccggactttgcgatgccgttctatctgtccggcggattgctggccgtgctggccgtactgtgcgcctccgtgttcgccatgccgccgcataagcgccgcaagcgcatggtggaaggcatggcaagcgccgtaatcgaggaagaggcacccgccagcatcgcagtgtccgggaagccggatggtgcaagtcgacgtaatcgtcgccgtcacgccacacatcggcgttcgggccgtgcgtcctcgcaatcctcgcaatctgaagccaccgaaacaccggttatcatcgacccaagttcgcgtaacctggtcgccgaccagcagaccggtgccgaaagcggcgctgagcccggcctcagcgccggcgataacgaatcgacttcggtaatcacccctgacgaactgcaggcctacttctcccgcttggcccaagaggtcaataccggagacgactcggccgatgacggacaggaggaaagctgatgaacaagcgatggaacaaactgtgtgtgtccgccctcgcctgcgtggcgttggtcgtgccgttgaccgcctgtgaaggccaactgccgacgccggctgctgatacctccaccaaggttgcgccggatttgaccgaggcgcaggagaagaagattcgtctgaagattctcaagacgatcgatgaagccgatcaggccaagaatcccgatgggtatgcgaccgttatgggcgggccccagctggacattcgcatcagccagaccacgatcaatcagcgtggcggcggtatgtccgaatatgcgaccattcccaaggacatcgcccagacggtgattcctacggacgacggatggcctcgctcggtgttcaccatcacgaccaccaccgaagatcagcagtccaagcgtttgctggtcttcgatcaggaatccgcccagcagaattacaagctgatggctatggctcgactgtttgagggcgccaagctgccaaagttcgagattccgactattggctcgcagatgggcaccgcaaaggatgagaagctggtggccactcccgctgatgccttgacccaatacgccgatgtgctgcagaacggctccaagagccaatacgcttccaagttcgcagacgatttgctgcgccaggaactggccaataccacggccaaggtgcaggaaggtatgcaacgcaacaacggtacgcaggagcaaaaattcaccgctgtgcctgaacagatgtgggtgatgcgtgctgcagacggtgccggtgatctggtggttggccgtattaacggcgaatggactcgcaaggcaggggatggccgcgaatcgcggccggcttccgacgacgagaaggcgctgttcaatagcgacaagtacaccagcaccatgaaggtcacgtatgtgaacgtggtggccttgtacattccgttggcaagttccggtgagcaaatcaccgcagtgggcgccgaccgtcagccggtaaaggtcgaagcgctgtaattgttgccgccacccaccgcgcggttaacgcccccaccacgatgtgattcgtccaccacgatgtgattcgtccaccacgatgtcgataaaattttacctttcgcataatggtgccgtttggggtcacatcgtggtgggcgttttgctacgtggtgggaatttcaccgcgtagtggaagaatccctacgtggtgggaatcggcattacaatcaatgtcagcaaatgtgattgttgttgtacgcgaatcgcgtggaatcgggaggcattatggcagagcagcagttcaatccgggagtctcattggcgggcgccgtcgatttggaggcgctgaagcatcaggtcaaggccgagcccggacaagcgggcggcgcgcctgccgctggtgggtacgtgatcgacaccaccgaaaacaccttccaggcaatggtgcagacttccgcgaccttcccgatcctgctgctcctgtgggtgccgaccgatgaccgcctgttcccgatggcccgtgcactgggcgacgcggtgaacgccctgaacggccagattcagctctcccgtatcgatatctcgtccaatccctcgattgcccaagcgctgcaggtgcagggcgtgcccgcactgttcgcgttgattgccggccgtccgatgccgctgttgcagggccttccgggtgacgacgagctcaagcaacttaccgacgaggtgattccgaagatcattgaggccgccgcgcagtctggtgtgaacggtaccgcgccgtactcgggtgatcctgattccgatgccgccaagagcgctggtgccaccggtgccgtcgcgggtgctgagcaggtgccgccggagcatgccgaagcccatcgtttggccgaggaaggcgattacgccggtgccgccgccgaatacgagcgcgtgctcgaatccgacccgtccgatgcactggccgcccgcgaacgtgcgaaggcgctgttgctggcccgctccggggccgctgatgtacgtgacgtacgtgccgctgccgccgcagcgccggacgatgtggaagcgcagttggccgtggctgatatcgacatgattggtggccagattcaagacgctttcgaccgtttgctggactttttggccgccgggcacaaggccgatatcgagcaggttcgcaagcgtctgctcgaatacttcgccatccccgaacccaccgacccgcgtctgacccgcgcccgtcgtcgcctagccaccctcatgtactaagtggttttggctcccctctttgagaggggctgtcgtcgtagatgactgaggggagctcacgagcgtactcgattgctcccccctaaaccatccgattcttcccgaaatactgctggaaccttggcccctccagcgccagctcctcctcgaaatcatccgcccacttacagaacggacggttggcgagaccatcgttattgaatcgcgcctgatcggtgatttcggtgatgcagaatttcggaatcgtcagattggtaaccggcccggatcgttcggcctcggctacgatgagcggcgcattcggcccgccgaacacatccacgctccagccgtcttcctcaatccacacggaataccggttcttgatgattaccgagccgccgcgcttgatgagttcggccgcgatacgtgtatcgatttcgcgctcgacttcgtagcgcgtgccgcccacggacggacctttgacggtgacatatgcttccgagaaccggtcgcggtattcgtccagcacggccaccggatttacgtcgggcgtcatgtcgacgtgaaccttgcgcgagaccagccgcacgcgcaaggcgtaattgtcggcatgcacgtagtagctctgaatgatgagggtcggggcgtcgccgtcgtcgtattccgccggcagttcgcggcagaagaagcggcgttcgtattcgaagtcatctgtaggttccgacataaccccattgtagagccgataatggcgattttctcgttattttggcgacgtatgtgccgcatgcaacgtgatgtggtgtacagtaaagaagttgctcgggtttgtagctcagtggatagagcgtctgtctccggaacagaaggtcgtgggttcgatccccatcaagcccaccagcatggctttcggctaaccgccggaagccttttgcatattcggcgcgtgcaaggctggtgctggtgtcggcaatggcaaggccggtgatgccggctcgcttgggtcgtggaaaaaccgtccggtttggcgagaacggtagccgaatcgtctggaatcgtctggaatcgtctggaatagcaaggaatagtctgttgatggccgtatgccgagcatcatgcgcgctaaacgcgactttgctcagtagactgctacgtaatcggcattgccaatcgttgctgatcgtgcgattggtcgtagccggtggtgatgtgtaccggcgccggccgcagcaggtgggcgcccccaagatgagaaggagcacaatatgagcgaaaagatggaagccgtagccacttccgaggcgccggccgcgctgggcgcatacagccaggcggtgaaggccaatggcttcgtgttcgtatccggccagctgggcattgatccggccaccggcgaactggcgggcgagaccgctggagagcaggctgcacaggcgctgaagaatattaagcacattctcgacactgccggtaccggcattgagcatgtgtgccgcgccaccatctacctgaagaacgtcgaggacttcaaggaagtggacgcacgttacgctgaggtgttcatcggctccgtcaagcccgcccgcgtggcctttggcaacaacatgattcccaagggcgcgctcgtggagattgacgccatcgcggtggagtgattcgaacgttttcccggcggcccgtctgcgcgcatggtgtgtgcagacgggccgccgcgtattgtgcgacgcattcccgggaatgttgcgctggaatcgttgggcggtggtccgtgccacaatagagaccatggcatccaaaggaaaaccgtcgccgcgttcggccgtaagcccgctgagtgatgagcaggtcaagcgtctggccgcccgccacacgcttgtggactcgacacagtattacccggccggcccccgcacgcccaatcagccggaaatcaacgcccagaatcccaaggccaccaaacgactgctgggaggggtgtccattgtgttccgcgccagctgcaagaccaaggcctggggcttggaacaggtgccggaaaccggaccgttcatcaccgccgccagtcatgtcaccatgtttgatgtgttcgtgccaatgatgagcctgttccacatgggccgccgcccccgttacatggccaaggccgagatggcgaagtggccattgatcggcaagtggttccagttggtcggcatgcagccggtgcagcgtcattcgggcaaggccaagcagatcgaagagacctcgattgatattctgacgtccggccgcccgctgacggtctggccggaaggcaccgtgacccgcgacccgaaaaagtgggtgatgagcattaaggagggcgtgggatatatcgcccttgaatcctcgcgcagactggggcatcaggtgccgctgtacccggcggtgacgtggggtgccgcctccatcaaccactggtggccatggccgcgcaaaaacgtggtgatgtgctatgaccatgcgctcgattactccgatctgcttgccgacatggactcatggggtgaagagccgcctgccgaggccgtgaacgagctgatgtggcgcgtgctcaaacgcatgaacacagtactggaggaaattcgtggcgagcagttccccgctgaaggctactgggactaccgcagtatgagtcgtaagccttggcctgaagccggcggcccgttcccggctgagaagtagccgcaccggttcccgtacggggagcctaggcgagtagcatggcacaagattgtgccgatgaagttgcgcgacaagcgaaggtaggaatttgatatgggtaaaaatataacggttctcggtgcaggagcatggggtactgctttcggccaagtgctggcggacgcaggcaacacggtgaccatgtgggccaaggagcagcagattgtcgagggcattcgcgatcaccaccacaacgccgtgcgcctgccgtccgtcgaaaagttgccggacaacatgaccgccactggggatcgcgccgaagccgtcaagaacgcggacatcgtagtcgtggccatcgccgcgcagttcgcgcgagtggcactcgtcgaattcaagggactgattcccgatcacgccatcgtcgtcagcctgatgaagggcatcgagcgtggcaccaacaagcgtatggacgaagtcgtccgcgaatcccttgacttgccggccgaccggttcgccgccatttccggaccgaacctgtccaaggaaatcgccgatcgtcatcccgccgccaccgtggtggcttgcacgaacctcgataatgccacgaaggtggccgaggcatgcaccacctcctatttcaagccgttcgtgaccaccgacgtcatcggcctggaaatgtgcggcagcctgaagaacgtgaccgcgctggccgtgggcatggcccgtggtgccggctacggtgagaacaccgcagccatgatcgaaactcgtggactggccgaactgaccgcgctgggcgtagccgctggcgccgatcccaagaccttcttcggcttggccggtgtgggcgatctcatcgccacctgtggctcttcgctgtctcgtaactatacgttcggcgcgaatctcggcaagggattgacggtcgaagaggccaccaaggtcagcaacggtgtggccgaaggcgtgcccaccacggatgcggtggtggctcttggcgatcagcttgatgtgccgaccccgttggcgtatcagatgagccgcgtgctgaacgaaggcatttcctgctcggagatgcttgccggactgttcggtcacgaggttaccggcgaataacgagagaagcgacgtatacgtggcgtatacgttgtacgtgcaaagtcgcgtggcgtatacgtcgttgacgtgcacgagtagactggtgtgcgtctcttgtgcgcggcgttccgagcgcggttcggtccggttggcggtgcaaagcataggcttgaaaacggttgtagtttcaacaaaaggatggttatggccaagaagcgtgttgtggtgctctatggtgggcgtgcagacgagcattcgatttcctgcatctccactgccggtgtgctgggggccatggacactgaacggttcgagccgattccggtcggcatcaccaaggacggcaagtggatcatcaatggcgaagatccgcgtggctggaacttggacggcggcgagctgccgaccgtaaagatcaccccggaatcgcgcccggtgatgcttgacccctctcgcggacaggacggtttcttcatcggcgagcccagccacatcaattccgccgattccggcttcggcaccagcttcgtcagcatgtccgacccggaaatgcaccatgtgctgacctcccttggccatgtggacgcggtactgccggtgctgcacggcccctatggcgaggatggtacggttcaaggcctgctggaaatgatgggtgtgccgtacgtggggtgcggagtgtttgcttccgccgcctgcatggataagcattacaccaaggtggtactggatgccgccggcattcccaccgcgcccggtgtgacggtcgatgcgcgcaacttcaccgccgccgatgtgcttgccgagatcgaggacgccggtcttacttatccgctgtttgtcaagccttcgcgcgcaggctccagcttcggtgtgaccaaggtcgagaaagccgatgaccgcgagacccagcaggatcgtctggccgccgccatcgccaccgccggcgagcacgactggaaggtgctcgtcgaacaggggattgatggtcgcgaaatcgaatgtgccgtgctgtgcccgaaggccggtgacgagcccgaggccagctggcccggcgaaatcgtgctcgatcatcagaacgacgaccagttctacgatttcgactccaagtacatggatgcctccgccagccacgtggaagtgcctgccaatctgccggtcagcgtgcttgaggacgtgcgtgacgtggcccgtcgcgcgttcaaggccgtggatggtgccggcttgagccgtgtggacaccttcgtgacgcctgatggcacggtgatggtcaacgaaatcaacaccatgcccggcttcacgccgatttccatgtatcccaaggcttgggatgccaccggagtgagctacaccgaactcatcacgcgattgattgagggcgtgctgagataagtgtggtgcggaatcggccgccaaggaagagggcgcgctgaacgtcatcgcccttccgcacgactggtccaactacggcgaggtcatcgagggcttcaagaagaagtacccggagatcaaggtcaccgagctcaacccgaacgcctcatccaaggaagagctcgacgccgccaagaccaacaagggcatcgacgccgcccccgacgtcttcgatgtcggccagtccatcgccgccacctccaccgactacttcgccccgtacaaggtgcaggcctgggacaagatcccggacgggcagaaggacgccaatggcgcctactacgccggtatcatgtccgtgggttggaacgccgacaagtacggcgacatcaactccctggacgatctgctcgacccgaagttcgccggcaccgtggccgtcaacggcaagcccgccgaggctggcgccgccttcaacggctacctgatggccaaccagctcgccggtggcgacatcaacaacctgcagcccggccttgactacttcaagaagctcaaggaggccggcaacctgaccaccgtcgacgtgaccaacggcaccatcgactccggccagaccggcgtggtcttcgactggacctacaaccaggcctcctacaagaaggagctcaaggacaagggcgtgaactggaagtacaagaccttcccgaaggcccaggtcgtcagctactacaaccaggccatcaacaaggacgcgccgcacccggccgccgcccgcctgtgggaggagtacctgtacaccgccgacgcccagaacctgtggttcaagggcggcgccaacccggtgctgctcgattccatgaaggaagacggcaccgtcgaccaggccactctgaaggacgccatcaccatcgaaggcgagccggtctcctacaccaacgacgactccacccgcatcaccgagtggctccagaacaactgggacaagacgatcggcaactgaggcacagaccgatgaccgccgcaatcgcacccattgcatcgaacggacctgctgccgccaaggctgcgggtccgtccgctactcccgcttctcctctctcctcggcgatggccaagcaccgccaggagctgggcacgctcgccaccacgctcccgttcttcgcctacaccgcctgcttcctgctcgcacccaccgtcatcgtgattgtcggtgcattccaggatcgcagcggcaacttcacgctcgcgaacttcaataagatgttcgaggccaacaccatcgccgcattcggcacctcgattctggtgtctttagcatcctctctgatcggcgcagtggtgggcgcgctcacttcctacgcactggtcattggtgccaagccgaacggcctgctgcgtcgtatggtctccgccatctcctccgcgcttgctcagttcggcggcgtgatgctcgcgttcgcgttcatcgccaccatcggcatcaacggtatcggcaccatgcttatcaagacactgaccggctacaccgtgaacccgaactggctcagttcgttgccgggcctggtgaccatctactgctacttccagattccgctgatgatcatcatcttcctgcccgcggtcgattcgatccgtccacagtggcgcgaggcatgcgaatccctcggtggcaacacgttccagtactggacgcgcgtggcctgcccgattctggcaccccgcttcatctccgcgttcctgctgctgttcgcctccgcgttctccgcatacgcgaccgccgcggccctgttctcccagcgttcgattctggtaccgcttatgatccaaggtgccatgcgcaacgaactggaccccaaccagcagggctttgcccaggtgctggcattcgcaatgatcatcgtcgtggccatcgtcatgctgttgagccacgccgtggaaaagagggccggacgttggcaatgaccgaaacttccgcaaccaagccgccgcagctgcgcgccgctcgtgcgcgtaaacagagcatcatcaaattcgtgatcctgttcgtcaccctggcgttcctgttcgtgccgctgctggccatgctcatcttcaccctgcgtcacccgctgtccggccgctggtcggccgcgccgtggatcgcgattttcaccggcaacggcgagtcgctgggtgccgacctgaccgtgctgtggcagggcatcggcacctcgctggccctgagcgcggtcaccgtggtgatcatgctggtgctgctggtgcccaccatggtcatcgtgcatattcgctccaaggttttggagcgcgcgatcgaatgggtggccacgctgccgctgaccatcccggccatcgtgctggtggtgggtttgggcccgatctaccgctggctgtccgccgacgtgctgagcaccaacccaatctggctgtgctttgcctacgtgattctcgtgatgccgttcgccttccgcgcgatcgccgtggggcttaactccatcgacgtcaagacgctggtcgaggcatcccgctcgctcggtgcctcctggcccaaggtgttcttcaaggtgatcatcccgaacctatggcagtcgattctctcggcatcctttatctccatcgccgtggtgctgggcgaatacaccgtcgcctcgctgctcggccgtatgaacctgcaggtcgcgctctaccagctcggccagtccaattctcaaatctccaccgccatgtcgctgctggctctgctcttcggcgtggtgctcctcgttgcgctcgacctgatctccgacgcaatgcgcaagtcaagggaaggtaagtaacctgatgaacagcaattcgattttcacccgtcgccatgccggtgccgatgccgcggcttctgtttcggcacccgcccccacgtccgctgccgccgaggacgccttcaagaacgaccccaccgccaccctcgaaggcgtgcgcggcaaggacgtgaccaaggccgccaaggccctgctcaaagacagcgccaagcgcggcggcggctccatccagatgcgtgacgtcgtcaagatctaccccggctccaccgtgcacgcgctcgacgacttcaacctggacatcaagcccggcgaaatggtcgtgctgctcggcggctccggctgcggcaagtccaccgcgctgcgctcgctcgccggcctcgaagacatccagggcggccgcatcatggtcggcggccaagacgtcaccggcgtgccggtcaacaagcgcgagatggccatggtgttccaggcctactcgcttttcccgcacatgaccgccctggagaacgtggaattcggcctcgaagtgcgcggcatgggcaaggcagaacgccgcaagatcgccatggaacagctggagctcgtgggacttgccgatcaggccaagaagtacacgcagcagatgtccggcggccagcaacagcgcgtggccctggcccgcgcgctggccgtcaagccgcgcgtgctactgctcgacgagccgctctccgccctcgacgccaaggtgcgcgtccagctgcgcgaccagattcgccgcatccaactcaccaccggcaccaccaccgtcttcgtgacccacgatcaggaagaggcgctggccgtggccgaccgcatcggtgtgatgaacaaaggcaagatcgagcagatcgccgccccgcagaacctgtaccagcgccccgccaccgagtacgtggccacgttcattggactcaccaaccgcctgcccggcgcatccaatggcgacgaggccgtggtcttcggccagcgcgtgccgctgctcgccggctccgccaagggcgattccgtggccgtgctcgtgcgcccggagaacctgacgctggccttggccggcagcagcgattcgcacgtcggcgaacgcgcccgcgtggaagtcgttcacttccttggctccttggtgcgcgtggatacggtcatcacctccggcgaataccagcgctggaacaagggcgaacagctcaaggccaccgtgcagctgcccgccagcgagctgctggccggtctggcggtgggcgatgacgtgattgtcaccccgcgtccggtcgccgcgctcgcctgctgaatggcgttgcgatgattgtgcggttctgttctgtttttgtgactgtacgatcgtcgaatggcttatcggcaatgatgtgtgtgggacggcggcgatttttgggcgattatcgcgtgccgtcccacagcaatcttgcagagtaggggactttctcggcattgggaatgattgacgttgatcattccttgcccattgatgatttcctcccccattcccaatgcaatcgaaacgccgtgccgtattcttgaagagtattgcacgtgtgatcggtccgtttgcggccagtaactatgggggataagtatgagcgaaccaatgccgccggcgcagcaacctcagcaaccacagcagccgcaacaaaccccacgcgattggtggttcacggcccatcgccggttttcgacaatcggctcggcgctcgccattatgatggtgttctggatcggactgaatattctggccactgaagcgctacgaacgctgcttggcaccgatgtgcccgcttgggctgtgctgctcgcctcctccggaccgctgtatgtggtggccatgccgctgagtatgttggccttcactcgcgtaccggttattcgcacccggcagtaccccatgaaggcgggggagttcattcagattttcgtcatgtgcattccggtaatgttcttgggcaatatgattggcaatatattgtctgccggagccactgatggtcaggccaccaatcgcatcaacgacgtgattcttggcagcgactggcggatgaacgcattgttcataggcctgttggcaccggtttgcgaagaatggatttttcgcaaggagattatctcccgcctgcgccggtacggagagaagaccgcaatcatgttctccgcattggcattcgcgctattccatatgaacgtgttccagttcttctacgcctttggcctaggactgatgttcggatatgtatacacacgcacctcccgactgcggtattcggtggctatgcacatgctgatcaacctgaacgggtcagtactcgccccattggtgatacaacagatcgatccccgcatcctcgacggcacggtcagcgaggccgaaatcatgcgtatggctgaaaccggcaacatgggcggcatgggcatcatgatgttgtacggcacagtgatgttgggcctctgcattgccggtatcgtgctgcttatcaccaagtgcaagagctgggagttctatcttgcgccagaggagttgcctgcggggcttaaaatacgcaccgcctatgccaatcccggcgttatcgcgtacctactgttgactgtgatgcttaccggttggatgctgttcgcatgactgtcatagccggacccagagaggcgagccgggagatatcacagattgcctgacgagccgccatcttcaacaaggtattcggtgcccgaaccggcgatggctcgcgccgccatatctttgatggtggaaggcagcacaccctcgcgcgcgaacacaagcacttggccggtcatgccgtaaggggagaagccggtgaacttgaccaatggcggctgaccctccagcgccacgtcggcggtggctttggttacgcggtcgagaatatcctgactgatcgcagacgggtcgccggaggtcttggccgtgaactcaagcgtggccatgccttcgctgaccggcgtgagcttggtcagggcggccgtattgagtaccgaattggggatgaccatcatgtctccggaacgggtgcgcaccacggtctgccgccaggtgatgtcgtgcacggtgcctgtgacgccttgaatggtcaccagatcgccgggttggattacgcggcccagcatcaggccgaagccgccgatgatgttggcgattgtatccttcagacccagcgagatcgccacacctccaacaccaagggcggtgataagtgtggtcggattgatgccgaatacgggctgcagtaccatcgctgcgccggtgacccagatggtcacgcgcgtgaggttcacgaaaatcgaggcgctgggaatctgagaattgtccagaatcttgcgcaacacgcgactgatgacgcggtcggccacaaatacgatggccaatacaatggtcagccagatgagtttgccggcgttcacctgaaaccagcgtgcgatgtcttctgcatattcagtcatacgcctactgtatcggtcgtttctggtgaagtcgtggagacggggtggcagaaagcggaatcggcctacggtcgattccgctactcctggtgctcgcggcaggtctggccgaggccgcgggccagtcgaatcggatcgagaatctcgtccaactgctcggcgggcaggtcggtgcgttcgccggccacctcgcgcacggtacggccggtgtgcacggcttcggcggcgatgtcggccgcgtgctcgtagccgatgtaatggttgagcgcggcggaaatcgacggtgaggactgggcatatgaacgccccaggtcagcattgatttcgatgccttccacgcagttgacgcggaacgtctccatggcgtgcgtcagcaacgccatgccggtcagcagctcatgcaccatcaccgggtcgaaggcgttcagctgcaactgtccctcggccacagcccagttcacagtcacgtccatgccgaagatcgtgaaacagcactggttgacgcactcgggaatcacagggttcactttggccggcatgatcgacgatccggcctggcgagccggcacgttgagatcgttgaaaccgcagcgcgggccggaattgagcagtcgcaaatcgtcggcggccttcttcaggtgcacggcgaggctcttgatggcagccgacgtggccacgtacgcgcccatatccgtcatggcggccaccggatcgggcgcggcggtgaccggcagcccggtgatttgcgccagatgcttgatagcggacttgcggaatcgcagatccgcgcaaatgccggtaccgatggcggtggcaccgaggttgagctgggccagcagcggcaccacgcgatcgaatgcggccaaatcagacttcaacagcgtggcaaacgcatgaaattcctgaccataggtcattggtacggcgtcctgcagctgcgtgcggccaatcgtcacgtcattgatatgtttgtcggccagatcgtggaaggccttggcgagtttcttggtggactcggcgagcggcccgatcgcgtcaataagcgcgagtttgcaggcggcagggtaggtgtcgttcgtggactgcgactcgttgacgtcgtcgttcggatggatgtatgtgtaatcgccgcgctggcggccggcgatttccaacgcacggttggcgatcacctcgttcatgttcatgttcgacgaggtgccggcaccgccctgcatcacatcgaccgggaactgatcggccagtttgccggcctcaatttctaggcaggcggcgcgaatggcctcggccttggctgggtcgatcaggcctaattcctcattggcgatggcgcaggcgcgcttgaccgtggcataggcgcgaatcagctcgggatgttggctatcggtgatgccggagaccgggaagttgccgatagcgcgctgggtgtgaataccccagtagacgttcgccggcacctccatctggccgatgcagtcatgttccagacgggtcttgttcgatgtttcgctcatgcttccatcttcctgtgcgtgggttggaaacgccagcatgagaggctgattgcgccttgtgagaaacctcacgcggggtttgtgcggcggaaacaatccagactcgctggttttcggtcaagcggtgtacccggggaatcctgcggggccgttcgacgatgagatggtggatggcgcggcatgcgtggcggcgaccgacatgccgggggcggtcgaatcctgcgcattgtgcacgaagatgcgattccagtaattaagcatgtccttttggctcatggccaggtatatgcccatggccagcacggccacatcttctttaagcaggtctttgatttcgatggtgtcgctcaattcgggccaacgttgcagcacggcgagcatgccgcccacggtgaactcgaccatgagatcggttttcaggtcaaggttcttggggtcgcgttgcaatgtgctgagcatttgcagacggcagaagtcgcgcagcgattcggtcagttcaagcgtgctgtgcgggcctgccaacagggccaggtggtcgaggcgctgacgctgctctggatcggagagcgtggcggtgacgcggtctcgccattgttcctcgggattgccgttcggatcgggggtgcggttgatcggaatcgattcgacctgatgcaggatggctgaatcggccaattcgggcaggctggagaagtgatagtagaacgaattacggttcacgccagcctcacgcaccacgtcggtaacggtgatcttgcgatagtcgcggtcggcgagcaattcccagaaagcgttctcgaggcgttctttggcgggcagcacctcggaatcatggcgtggacgtggcatctcttcctcctgatgcaccagcgtgatatggtcacgctgtctaataacttattgggcagtataactattatttgtggacatgtctatgagctaatcggcgatttcagttgcgtcctccgctgatggcgaagctgtggtgccggcatcggcatcagtatcggctctggccggagctgcgctatctgctcctgctgcagtttctgctgggatctcggctgttgctttggaggtcgcagaacttggtgcggaagccggggcgggcgtcggcttgcgtttggccgtggacgccttgaacagtatcgccagggcctcaaccaaatgacgccggtctgcgggggtcagcccaacgtacgcgccaagcatcgccggaatcgaagcggggaagttgctcatcacctcgctgaagctggtggcgccgttggcgtgcagcacggtgaacagcgcatccaccgcacgctcgcgctgttcgggcgtaagcgtggcgatccaatggttcagctcctcgttaaacaactgcgagctggaactcaaatccggctcggtgatgaactggtcaccatccaatagccaggtgaaggcggaatgctgcatgatgccatccgaatcggaagagaccacgcggcaaggctccggggtctcgaaaatcatgcccacaatcgacgaactcggcacgattttcgtcaccttcggctggatggtgcggtaggcggggctggtcacaatctccggcgggaaaccggggccatccagtgaatagacatgctgaatgcgcttgcgcaccttgggatcggcgttcatggccgcgtaaatcgccagattgcctcccttggaatggccgaccagaataatcggaccctcccacagtcgcgccaccatatccagataggcgctggctgaccgttgcgccggcaccggatactggaaagccatattgaaatcttccttccatccgatgagcgaatcatcggtgccgcggaaggaaataaccaacgtgcctttgtaggtcggctttcggcgcttgtggccgtcgggcagctggaaggtggcggcggcgaattgggtttgctcaccctgattgatgtgctcgaccaccgcgcctaggcgaacgttggcgtagcgggggttttcgcctgcggcctggaacaggtcgtgggtcaggtccgggttgaccactgaaaccatttgggcctcgtgcggcttgtcgtcggcatgtgtttccggcgaacgatgcagctcgcggttggcctcgtcaaggcttaccgattcaagctcgggatgccagatacccttcagccagatcagtggatgcttgggttcgaaagcgcgaatgcgtgcggcgaacgagcctgaccgcgtctcatccagcatcaacgtcggacagacgctggccacatcctcatagatgagcgtggagatgatcaaggcgtcgatttcgttgaatggcaagtcggcgaaggggcgcgtttcggtgtgcgcgtaatcgataatgccggtcatacgcacctcctgcttccgttgatattgcatatccccttgggctgcgtggtcttgcgatcgcgtgcggccgtgcggctgcgcgcagcaattaaccatatgcattccattgtagggattgtacggttttggccggcgcgatcgagcaagactgcaccgacggcgaacaattcgtggaaggattcccgtcggcttgtcgaaaattgtcgggtagcagggttgcgatgccagccagccgaccaccctccggcgctacgcgccatctcccgccggcgggagggttaaccactcaatcctttttgacgaggcggaccgctgggcccgtcaaaggttcggcagatcgaagcgcgccagatccacgccctcgagttcaagcaactcggccttgatgtcgagtcggccgccgtagccgccaaacgcgcggcccgagccgactacgcggtgacagggcacgatgatggtaaccggattgcgcttcactgcgcctccgaccgcctgcgcggccatgcggccgccgccgcgtcgttcggccaattcggcggcgagttcgccgtaacttaccgtcatgccataggggatttcggccaccagattccacacttcatgttggaatggcgtgccggcgggatgcaaaggcggcacctgatccgagccggggcgttcgccggcgaaataggcggtcagccattcgcgggttatacggaatacgtcgggttcactatcggattcgcgattcgaatcgagaacggcttggtgatcggtggcccaccaccagtcttcaagacagagttcggtaagtccctcgccgtcggagaccatcatcatccggccgatgggcgtttcgactgtggcccgcatcagttgtcgttgcgtcataccgccattatcgcgcgttgagggatgaagcccataccgtgcctgattccatgaaggacggcacgtcggcgtagttcgggaacttcacttcggcgctcgataatcgttggaaaaccggtgggacacgcgggggcttggctttttcctgagattggcgtatctttgtcacctgttgcccgtgaaggtaacacatgcggacatagcttagttggtaaagcgcaaccttgccaaggttgagaccgcgggttcgagtcccgttgtccgctctcggatggttgattcatactgattgattcgaccggatgatgacccgggcggttggcgcagtggtagcgcacttccctgacacggaaggggtcacaagttcgaatcttgtatcgcccactcgatgaatcgccggcagattgttgccggttttttcatcacaggctcgggcgattggcgcagcggctagcgcacttcgttcacaccgaaggggtcgtaggttcgattcctacatcgcccacccgagattcacgctcgttggccatgtggccgcgagcgttttttcataatcgacgtattccgattatgccggtccaatcggagtgcgggctagaatgccgcggagccggcagaatggcgggattccgccgatgcaacctgtggttgcgcgcgaatatgcaacctgaagatggtggcgcggaactggtttgccgtggcatagtgagggcatcggccgaatatgtcatgatgagcattacctatgaagggacactccgatgagcttccgcaccaacctgcaatacctgcgcgcacaacgcaacatgacccaggaacagctggccatgttgctcggcgtctcgcgccaggccatctccaaatgggaatccgagaaggcctatcccgagatggacaagctgcttatgatctgcgacctgttcggttgcacgcttgatgacctggtacttggcgatgtgagtgcgagcgtgaacgtgggcgcggccgcgcgcggtgcggcggagagcgaccatggctcggctgccagaaccgtaaccggggagggcgccggggaacccgcgtatatgaaggatactgatgggaacatcggtggattagcgcggtccggcggtgacggcatcaatggcccgagctccgcaaatgcattgcccggcgaaatgttgcacggaaccagttcatcacgtcccggcacgctggctaatgtggctgccttaccgcaggatctgaccggctacgatgaacaccgctgccgattcgcgctactgattgccggcggtgtcgcggcgattatcgcgggagccggcatcggcaacctgttcgattccgataattccattctcggcgtgacgccactcaacgattttctgacattcctgggcatctgcgtgggcgtgatcatcgggctggcgatgctgattccgggcggcatgtcgcacaccgacttcaaacggcggcatccctatgtcgaggatttctatgctgcgagatgtcgccctcggcacagagttgccgagggccggcaaatcactcccgcgtcgggtccttttgcaggagcaggaaggccagcgccacgacgagcaggacggcgatggagagcacgccgagcgaggcgttgccggtcagggaggtggtggtggccaccaggaaagtgccgatgattgaggcggtcttgccgaagatatcgtagaagccgtaatactcgttggcgtgattcttgggaatgatcttgccgtagtacgagcgggagagcgcctggatgccgccctggaacatgccgaccagaatcgccagaatccagaactccgcggccgacttcagaaagaacgaggcaaagaacacgatgcacatgtatgccacgactgccgtcgtgatcatcactttgcagccgaaccggccggccagacggccgtagagaatcgcgcaggggaaggccacgaactgcgtgacgagcagtgccaccaccagctgggtggagtcgatgccaagctcggcaccgtaggaggtactcatcgaaatcaccgtgttcacggcatcgatgtagaagaagaacgcgatcatgaacatccacaacggcttgttcttcacgattttgccgaacgtgcccgccagttcgctgaacgtgccgcgcacggccgagcccagctggtcacgggtggcgcgatagtgcacttggcggtagctggtaagcagcgggatggtgaatgccacccaccagatggcggtgatgatgaacgaggcgcgcgtgcaagccaccgtggaccagtcgaagagcgacgggccgccgaagatcagcgcgatgcagaagatgaacggcacggtggagccgatgtagccccagccgtagccatgcgaggagaccttgtccatgcgctcgttcgaggtggcgtcgatgagcatcgaatcgtagaacgttagcgagccgttgaggccgatggtcgccagaatgtagacgactaggaacggtagccaggtcaggggcagggccattgcgcagcaggtgaccacgccagtgccgaagaagccaaggaagaacttgattttcatgccttgcacgtcggcgatggagccgagcaacggcatgagcagcgcgatgaccaaggaagcaatggtttgcgcgtagccccaggcggacacgatgttgccgtccgccggcatcagcgatttggcgtaaatggggatgacggcggtggacagcagcacgaatgccgagttgccgacgtcgtagatgatccacttcttctcgcgggcggtcagtttggcgctttgcggcaccggttcgtggacattcgtgggatcagtcatatacactcctcgacagtattcaactcaatctatcgtagaagcgcggactagggtaggggaaccattccggttgaacggcggatgaataatgccgggcctctttctaaggggagccagagcaaaaatagctcccctcgctgaggggagctggccgcgaagcggactgaggggagctacctatagtcgactattcgccgatcagcgcgatggcctcgtcgtaatcggggcattgcggcacgccgttgaggctgtgctggatggcgatggatgccgccgcgttggcgatctttaccgattcggccagactatggccctttgccagcatcgcgcacatcacgccggtgtggcaaccgcccgccgaacgggtgtgtacggccttggtcgggtatccctcgatatgaatcgtctcgccacctggctcacgaatccaagcgccgcgggcaccgacacgcaccaccagcggtgcgcgcagtgtagcgcccaagccgtcgcacaactggtgcatgaagtcgtcaagtccgccgccaatggtgactttgctgtcgtcgattggcgcaccaagtcgctcggccagcgtcatggcctcctgacggttgcaggaccagaccgggcgtgcgagcaccaggtcctcaagcatatggtcgttgaccaaacgcaacgtattggtggggttgatcaccagcgtgtagtcgcgtgcagccgggtcggtaccggccttgagcaggaatccgtccacgccggtggccgtgtggtccatcagtgtgttgccgctgatgtgcaccacgtctttgggctgcggctccagcgtgtcgaacgtgtccgagtcgccatgagcctcggcgccataggaagcgatgaatgtcttcttcggcgcgccggagctcagcaccacgcggaagccggaatcctcatcaagacgatcctggccgatatgcgtaatgccgttgtcttggaatgactggcggatgaaatgcgcccacaggccgttgcccagaatgccggcgtgctcggtcggcacgcccatgcggctggccgcctgcagcacgcgatagctgccgccaatggagggcttcggatgatcggccacggcgaatccgccctgtgccggcaccttgtccacattgagcataatgtccacccagacttgccccagtgaaatcacgctgggctcgtgagtgccgatacctcgcttgagattcaacatgacagcctccttcgtcgtaagttgcacgaggaccccttcgtcccttgccgtctcttataccgagattatatgagagtttgctggatgcggaaaaggaaggccggcgtgttttatcgggtaaacgctatgatttgcagcgtaattcgccgctggcgaactgctgacgaactacttgcggaccgctggcgaaccaatgccgagccgctcgtgaaccgctgatggcccactcgcaagttacgctcgaaccgcgcgtgaaccgccgaggttcgcccatgatacacgcaagagttgcggttgtcggtattgggctatatatttgtgaagttgtgtgttcggcatgtcgggtgaaaccggcggtcgaatgcgtgaaagacttgacacatcaaggttaagggagtccatcatggcagctcgttgcgcagtgtgcggcaagggaccgcagaccggtttcaccgtttcccattcgcaccgtcgtaccaagcgtagcttccgcccgaacctgcagtctgtgcgcaccacgattgatggcgagaacactcgcctgcgcgtgtgcgtcaagtgcctcaaggctggcaaggttcagcgcgtggccgcgtgaatcgcgtactaacgtggagcaaaacccgtttgagcttcggcttggcgggttttgttgtttctgcggcctaaagaggccgtgcgaatagaataggccaatatgagcatcactatgggcaccactctcgcttcgctggtcaccaacaagcgtcgcgtgtccgcgctcaaatcgctgggaatcgttactgtcggcgacgccctgacctactatcctttccgcgtcaccgaaccggtgccgcttcgcgccatccgcgaggccgcacccggccagcagatggcatttgccgccgtgatacgagatatgcgcgtggtgccgatgaacgctcgccgcggctaccgactcgaagcgacggtcgatgacgccgacttcgcccggtctcgtcgcgtacccggcagcacggcccggctcacgttcttctcgtatcgtaaatcgtatgtggattgggtcagcgtgcgactgcgcgccggcacgtctgtggtggtctccggtatgcccggcgaatacatgggtcagctgcagttcacccatcccgaaatcctcactgtcgcgcccgtgccggccggagcaggagcggggcttgagggttacgctcggggcgcggcatccggcaatggtgcgtttgcgggaagtgccgatccgtatgccagtgcgcagtccgcgtatccgccggccgcgactgccccttccggggccgcgttgaaatacgacgccgataccgtgcaagaggcgcttacccgcgtctgccggccccgcccggtatatcacgccagttcgcgtatctcgtccgaacatattcatgagacgattctgggattgctgtggatgatgggggcccgcacgtcatccacgcctgacgggcaactcgctggcgctggggcagccggcattgtggctcccgcgactgacaccatcgccgtccaaaacggggaagagaagtccggcacgaccgccgaatccggtgctgaggcgctctcccaatccatcccagatgtgctgcccgaatcggtgcgcaaggccaagaacctcatgcatcgggctgaggcgttcctggccattcatgatccggcctccacggcccggttcaaggaggccatcgaaaccctgcgctatgaggaggctttcgtttcgcagacctcgctgctgaagtctcgacagcacgcgcacaagtcatcggcgcatccttgcccgctgaacgaggcgctggaaacagctcgagcgtcggtgggcgaagcggttgcggagccaagtacgcaaccagaagcatcggagcgcggttctgcgaccgatctgcctgatctgcccaatttgcccaatttgcgcgaccgcttcatcgcatcgttgccgttcacactgacagccggtcagagtcaggtggtggacgacatcgcgtccgatcttgaacgtgactggcccatgcagcgtctgttgcagggcgaagtcggctccggcaaaaccgtagtggcgctcgcggccatgctgcaggcggtcggcgccggctatcaggcggtgctggtggctcccactcaggtgcttgccgaacagcattacgagaccatcagcaagatggtgtcggggctgacccttgcacagccgggtgccaaggagaccgatgccgcggccgacgttgagggcgcgatgggcgcgtccggtgcttcgacggtctcttcttccaaggtgactgcggaaattcccgtcaccctgctgaccggtggtatgaagcttgccgcccggcgtaaggcgctcgctgcggccgccagtggtgagccgggcattatcgtggccacgcacgcggcgttttccaagaccttccaagccccgcacttggccttggtggtaatcgacgagcagcaccggttcggtgtggaacagcgcgaaagtctcaacgccaaaaccgatgacggcaccacgccgcatctattggtgatgaccgccacgcccatcccgcgcaccgccgccatgacttggtttggcgatcttgatatttcctggctcaccgaattgcctggcggccgcaaaccgattcgcaccgtggtggtcaatgaggccgacgccgccaccatgggccgtatgttcgcgcacattcgcgcgcgagtcgacgcgggggagcaggcctatatcgtgtgcccgcgcattgatgcggatgatgaggggaacgaaggcggttccggcgtttcggcagcagccggttctgcccgcggacgcgccgcagcatctggttccagtgcccgcacagctgcgggcggccgtgcaacgcgcgcggcggctgacgccatcggcatcgacgacccctacgaaaccttcgacgaaaacggcgaaaccgtggctcgcccgccattgcatgcggtggccgaaatcgccgaccggttgcagaaactcccgcaattccaaggcattcggtttgcgactctgaccggccgcgacaaggatgacgtcaaaacccaggtcatggccgattttgccggcggcgagactccgattctggtgtccaccacggtgatcgaagtcggtgtggatgtgaaacaggccagctgcatcgtgatctttgatgccgaccgatacggcctctctcagttgcatcagctgcgcggccgcgtggggcgtggcggcaccaactcgtgggcgttccttatttcccgtgcggaacccggctccccggccgagcaacggctcgaagtgattcaccactcgctcgacggtgccgaaatcgcccaagccgacttggaattccgcggtgccggcgatgtgctcggcgacgcccaatctggcggcaagtccagcctgaagctcctgcgcgtggtcaaggacgccgacatgatcgccgacgcccgcacccgtgccgagcagcttctggctgccgaccccgaactggcagacgaggtccaactcgccggtgccgtcctcgacttcacccgaggcaacgaaaccttcctgacctccagctgaggcacctccagctgaggctagggctgcgcccccgtaatcgcacgatatagtttttccgtatgccgatcgtgaggaaatcacggtcgggaagccctcgaatgtgcttcagtggaggcaagaccattcgtacatgaggtactcgaagtgcatatatcattggtgcgcttcgagcaccccattgttgttcatgattggtatgcgcagatgaacctgtacagtgaaagctatgcgtgtaatttctggacgattcaagggtgtggcgcttgctacgccgaaaacgggtacccggcctaccacggatcgcaccaaagaggcgattttctcgcacctcgactcatggggagtgctggatgatgcccgtgtactggacctgttcgccggtactggtgcgttgggcatcgaagcgctgagccgtggcgcgcgagaactcgtggccgtggaaagttcccggcctgcggcggcgctgattaccaagaccttgtcgcagttacagaagaatcgttcgtgggatgcctcgctcaaggcccgtgtgttcaccaaaaaggccgagcaagtggctggcggctttggtgaatcctttgacgtgatattcattgatccgccctacgcctatgagaccgctgaatgcaatcagttgttggccaatctggcggtgggcagcgccgccaacgagaacaccgtgattatgctcgaacgctcggtacgctccgacacccccaccgcccccgaaggctggcaaatcactgaaagccgcaactacggcgaaaccgccgtcttctacatcgagcccgcggatgacgactcggatatagagcgttccgacgattccgccgcgtagtgaatctcccaccgtgtggtgaattaatcggcgagccggcgcggatgggcggcggagacctcccagcccaaggccatcagggtcttgcgatcggccttatccagcgccttgcaatccagtgccgcgataaggtctggccgaatctcggcggtgcgggccagcgcttcgtcgcggcgaaaacggtccaccttgccgtggtcgccggacaacagcacatccggcaccgcaataccgcgccacacggccggcttggtgtactggcgatgttcaagcagtgcgccctcgccggtgtaggattcctcaacaatcgaatctgggttgcccatgaatccgggcatcaggcgggtgatggcctcaagcatcaccgataccgctacttcgccgccgttcagcacatagtcgccgatcgaatattcgcgtacgtcgacgccttgggcgcggtagtagtccgggatgcgcgcatcgtagccctcataccggccgcagccgaacagcagatggtcggcatggctgagctcggtggcgtcgcgctgggtgaacaacggggccgatgggttcgggaagatgagcaccggtgcgccggatggggcgggggagccggacggctgcgagaatcccagcagttcgtccagacattcgctccacacttcgggcttcatcaccatgccggccccgccgccgactggcgtatcatccaccgaatgatgcacatcgtgggtccagtcgcgcaggttgtgcgccttgatctccaacaatcccttggcctgggctttgcccatcaggctgaggttcatcacctcaaagtattcggggaacacgctcacgatatcgatcttcatgtcatccagcctaacggtagcccctcccgcattacacggccaccactacactattgcggtgatgaatacgacgatgaacctccccacccgcaaaaagcccgaagtgttgtccccggccggcaacctgaggggcctgaaaaccgcggtcgattatggtgccgacgccgtctactgcggcggcaaagccttcggcatgcgatcggcccccaaaaaccttagccttgaggatttcgaggaaggatcgcgctacgcccatgaacgcggcgctcgcgtgtacgtgacctgcaacgtgctgccgcgcaacaacgagatcgaagccatgcgcgagtacgtcggccagctcaaagacaccggcgtggacgcgctgatcgtttccgatattggcgtgatgatgatggcccgtcaagtggctccgaatctggaactgcacgtctccacccaggccggcgtgactaattatcaggctgcgaacgccttctacgagcttggtgctcgccgtgtggtgttggcccgcgagatggacttgcaggccgtgcgtgatattcgcgccaacattcccgatgacctcgacatcgaatgcttcgtccacggtgccatgtgcatggccttctccggccgctgcctgttctccaactatctgaccggccgcgatggcaatcacggcgaatgcgcccagccatgccgctggaagtattcgatcgtggaagagaagcgccccggccagtacttcccgatcgagcagaccgagaacggcgcctatctgttcaattcgcaggacatgaatatgctggggcacttggatgatttgattgactccggtgccaccagcctcaaaatcgaaggccgcgcgaaaagcgcctactatatcgccgccatgaccaacgcctacaaaaccgcggttaatgaatacatgattcaacgcggttttgaagacgctgatggcaatgttttgaagcctttccatgaccgtgtgattcgcccgggcgaccccgattttggccaaggaaccgaagatcaagtgatgcgcaatgccgatgccgcgttcgccggtgtggccgatgagggatatgaccgtggctctgatactgcggttgccgattcggtcaccggctcggttgccgcagaacgtgaccgcgtgacggttgctgatgccgtcgactcaactgcctctggtacgccggccggcaccgccgtcgaacccgacggcatgagctctcacgcccgttccacgcgccgcaagtccaacaccgcggtcgaacagattgagaccgattggaaacatgcggccgttcgcccggccccacacgtcgaactgcccgaatggctgctcgaggaaaccgacaaggtggcccaccgcgactactccaccggcttctattacccggagcacaaggtcacacagaacaccgaccgctccgcctacttccgctcatggctggtagtgggcgaagtgctgagctggagcgcggacgaagacggacgcgtcacgctgatgagccgtaacaagattgagcccggtcaacaggtcgaattcctgctgcctggtgagagaccattggtctttaccgtgccggaaaccggcctgcgcgatgccgatggcgcgccagtacccgccatcaataatccggcgcacgtgttctcgatgccctgcccgcaccaggtgcccatcaacgccgccatccgctcgcgcaccaaaaagcccaccctcaaagccgaataacctaccactccgcccccgctgactgggggtggtcatgggaatcatgaacaccgcccgcacccaagaaagaatgccttatgcctgaatacagcgaagaaatcctcgattccaacagcatcagctctaccgataaagccggtcgccctattccggtgaccatccccatcgcactggcccccggcatcaaggtggtgtacaccacgcgactgggcggcctgagcgccggcgattacggcaacctgaacctcggcggcaagtccggcgacgaacctgaggccgtgctgtcgaaccgcatcgcactcgccgaagcggtgcaagcccgcctatcgctggtctcccaagtacattccggcgtggctgtggacgtggacgactcgttcgtcatcaacacccccttcggcttcgacgtgtccggcacacatggtgagactgacactccgcacgtcatcgaggcggacggccaggtcaccgcacaatccggcatcgccctaggcatgttcgcggccgactgtctgccggtgctgctgggcgacccggtcaccggtatcatcggtgcggcccactgcggccgtcgtggtctggagcgcggcgtgatcggcgccacggtggacctgatgaagagcaagggtgccgacccggcgaacatcgtcgccacacttggcccgcgcatctgcggcgactgctatgaagtgggcgacgagaccgctgaccagttcatcaagcgcttcccgctgaccaagacgaagacccgctttggtggtgccggcattgacatcgccgaggcggcaatgatcgacctcgctttcgccggcgtacatcaggtggtcgattcgatgccgcgcgtgcacgccgccacccagtaccttgaggaagatccggaactcgccgaactgtgccgtacggacggcgaaggcccggccgagctcgcggagcgcatcggcaacatcagccacagcatgtgcacgctcgaaaacccactgtggtactcgcaccgccgcgccgcgctcgccaacaaaacacacgaaggccgcctcctcgccctcatcgtgcgtgactaaacggagaatgcgagcacattccgtggagaagatgtgatgcagttcacggacggccagccctcaccctacggtggtgcctatgactgagagagatttcgatacccccgtcgagacgcctaccgtccagccggcccccgctcagggcgccaaaccggcgcaaaccgtgccggtggtggccgtggtgctggccgccggcttcggtacgcgcttcgaccccgataatcccaagcagcttgtctccgtgggcggcaagcccatcgtgtgctggagcattgatgcctttgaacgttgcgatcgcgtcagcgacatcgtggtggtggtcaatcccaaggtgcgcggtgaagtggaaacgttggttggcgagatgggctacaccaaggtccgcgtcatcattgacggtggtgacgaacgtgtggacagtaccgccgccgcgctcgacatgctggctacggctggcattccggacgatgccaagattctgatccatgacgccgtccgtccgttcgtggaacagtccgccatcgacggttcgattgatgcgctcgaccagttcacggccgcgaccgtggcctacgcctcaaccgacaccgtgctgttgaccgaggatttgggcgatttgaaagtggtcaagtcggtgccggaccgcccgaacaccttccgcgcgcagaccccgcaatccttccgcttcgcgacgattcgtcacgcttacgatttggctgccgccgacccggacttccatcccaccgacgacacgcgcgtagtggtcgattatctgcctgatgaacccgtcgccattgtctccggtgcggaaaccaacctgaagatcaccacgctggaagatattcccacagctgagcgtatcgccgaggagattctcggtcgtgatcccaaggaagaggcccgcgcccgcatgcacgccctgctggcccaagcggccggccagatgcatcgctagactggcattatgcgtgaactcaatgttgtgatctccggcttcgaccactatgacggcgtggaggtcaatcccgccgtcgaagtgcccaaggccatcgccgagcagggactgggcgtctcctctgctccggacgatccgttggagcaggtcgccgtcaccgttcatgccgtcagcatcccggtgagcttcgccaaagcctggcccacgctgaaagagacgattgaggccaccaagcccaatatcgtcatcgccaccgggctcaagcacgcagcccgaggcgtgatgcttgaacgatgcgccaccaacctgatggacgcgatcaagccagacgcggacaacgtgatcccacgccgcgaacccatcgaccccaatggcccggccgcctattggacccgcctgccgttgcgctcgatcctgaatgatttcacggacgattcgattccggccaccttgagttcggacgcaggtacgttcgtatgtaattcgctgttctacaacctgctcaactggaccgccacccaggagcgggtgctgggcggattcgtcagcttccctccggtcgttccggcgcattccagccagcatggtctaccactcgaccagcagatcgccgctggccgtgatgtggtgcgcgaagccgtgcgctactatctcaagccctccagctccgacatcctcatcgcctagcacgctgtgcgccacgccggaatagaacatggttcgcacgcattgtaacgattgcgcgtcgctcaacgctcagcgccagtgcgatgcgctacagtgctgcaaggatgtgccaagagctttatgcgtgtgcgaaaggaataaacagcgatggtggatcgtttcccggtggtgctgcgaggatatgacaaggagaaggttgatgctgccttcgacgctactcaggagagtatgaagcgtgcgcagcagacgttggccagcatgcgtgagcagattgcggcggatgacgaccgtattctgcaactgcaggcccaacttcaggaagagaagaacaagaagccggaaggcaacagcttcgcttccttgggagcgaacgcccagcagatgcttgcctccgccgaacagacgagtaccgaactgctggaacgcgccaagcaggacgcgtcctccatccgtaccacggctcaggctcaggccgaaacactgatcaacaacgccaagctggatgcccagcatattgttgacgacgccaatgccaaggccgcctcgattctgacgaacgccagcaatcaggccgaatcagtgaccacctccgccaacgaggatgccgcacaactgcgctccgaaactgccaagaccatcaccgaacagcgtcagaccgtcgagcttgagctcagcaacgcgcgcgaagagcacaccaagaagatggcttccgaacgctccactcaagagcgcgaaatcgccgacatgaaggcggaggcgacccagcaggttgccgcaatgcgcaaaagcgccaatgaggagatcaccaagcttaagtctgattccaacgatcagattgaggcggcgctcgccgaggccaacaagaagctcgccgacgtgcgcgagcaagtgtccaagatgatgaccgaagcccagcgcaaggccagcgaaatcattgatgcggccaaaaccaagggtcaggaaatcactgatgaggccgaggtcaagcgcaccagcacgatgagtcaggtcaacgccgaggtcgagcagatccgtcacgacatcgccgctcagcaggatgaggccacgaagaaggtcaacgaactgctgcagcacctcgaagagcgtcgtgtggcggccaagcgggaagccgatgagttggtcggtcaggccaagaacactcgcgaccaagccgattcgtatgccgcgtccaagcgcgaggaggcggacatccaggccgccgcaatcgtacataaggcgggcgaggaagccgatgcgcagatcgaggagcgtcgcgccgccgcccaaagcgagcttgacggtctgtccaagcgcatcgccgatctgcaggaacgcgagtccgtcatcacccagcgtgtttcggaactgcgttctatgttctcgcaggcgttctccggattcgctttcggcggtaatgcggcggcctctggtcaggatcaggaagccgctgccgcggcggcattgccggtggttgcgcccgtcccggaagtcaagcctgtacacaacgaggccgatgaccagccgggtgagttgagcggaaacgagtcggctgccgacgatcacaatgagacagatgcggcaccggctgattcggctgattcggctgattcggctgcgcagaatgagcagtccgaatcgtctgagccgtccgagctccagacacagggcgaaccggaggccccgactcaggagaatccggccgtatctgagcagaacggcgaatgacaggccttcgattagactactagcggtaagaattacggcacctgcgctttcgagccaggtgccgtattcgtttgaatctgcgccacaagcgcaccatcacagaaggagtatgacatgagtgaattgacgcctctgaccgacgaagcgttgaataccctgcgcggcgatttcgcacagagcggcaccaaccgtctggccatgaacgcggtgaccgccgccggcatcgacaaggtggctcgcaattatgaccgcgctcgtctgatgcagcgtcgtttctccaccatcgttgacaatggcgaagccacccatcaggatcgctccggccgctgctggctgttcagctccctgaacgtggcccgtttcgtggccaagaagaacatgaacttgaaggagttcgagttctcccagaactacgcgatgtactacgacaagctggagcgcgtcaactacttccttaaggatgtggccgctctggtggctgccggagagccttccgactcccgcctgatgcagcacctgctcgccgacgtgatgggcgatggcggccagtggaccatggccatgaacgtgtacaagaagtacggcgctgtgcccaaggacctgttcccggagaccgaatcctccaagaacaccggtgaaatgaacatccagctgcgccacatgctgcacaccgccgtggcgcacatgtacgccgctgacggcgatgcctccaaggtcgaggcgattattgccgacgccactgctgccggccaccgtattctgaccatccacctgggcgagccgccggtttccttcgactgggaatggaccgacaaggatggcgaattccaccgcgacggcgagattacgccggttgagttctggaagaagtacgtgggtccggctgatcttgaggactacgtgtgcctggtggacgatccgcgcaccgagcacgccaagggcaagaagatcggcatcgagcacctcggcaatgtggctggcggcgacgccaccgagtacctcaacgtgccaaaccagttcatgaaggactgcgtcaagcagattctcgttgagcagggcattccggtatggttcggtgccgactgccacccgttcatggaccgtgagaacggcgcttgggccaccgacctgttcgagtacggccgcgtgtacgacgtggacttcgatttggacaaggaagcccgcgtgcgcttcggcgactccgccatgaaccacgccatggctttcgccggcgttgacgtggccgacgacggcaccacccgccgctggcgcgtggagaactcttggggcgccaagatcgccgacaagggctacttcaccatgtccgacgactggttcaccgaatacgtctacgaggtagccgtcccgaaggccctgttgcccgaggaataccagaaggccctcgaagagccagccaccatgctccccgcatgggatccgatgggcgctttggcctgacttcgtcagcctcccggaatcggcctgacggccaatgctgtgttttctcgcagcctgtcggctgctagggtctctccctctgtcagcgcgaagccgctgacagagggagagaccgcggtcgcaggccgcacaacaacacagcatcgccgcaggcgagtccacacaggcgagtccacccaaagtccataactgccggcccaacaagcagtccccgtaacaaactgctatagttgggcttttgcgtctatggcgacataccgacagtacgtatacaaggaaaggagtcgagcaatggcagcactacgtggtccggatagttccgaggatgaacgtcgtttgggggagcaggccgtctttcctgagaccgtcgatgtcaacattcgtcagcttgaccccattcccgcgccgcgtgctttcctcagggagcagccgctcaccgatgagatgagcgagctcgtgctccactcgcggcaggaaatccgcgatgtgctcaacggccgcgacgaccgactgctcgtcatcgtgggcccctgctcaatccacgacccgaaggccgcgcacgagtacgcagaaaagctggctgccgtcaagcgcgagttggaagaccgactcgtgatcgtgatgcgcgtgtacttcgagaagccgcgcaccaccatcggctggaaaggcctcatcaacgaccccgatctggacggtcgcttcaatattcgtaagggcatgtggctggcccgcaaggtgctcaccgacgtgctgagcctcggcctgcccgccgccaccgaatggcttgaccccatcaccccgcagtacatctgcgacgcgatcagctggggtgccatcggcgcgcgtaacaccgaatcccaagtccaccgcgaactggccagtggcctgtccatgccggtgggcttcaagaactccaccgacggctccatcaaggccgccgccgattcctgtttcgcggccggcttcgagcatcacttcctgtccattaacttggacggtcgcgtgatttccgccgaaaccaaaggcaacccggattgccatctggttctgcgcggctccagccacggcccgaactacgatgccgaatccgtgcgtcaagctctggaagacctcaaggtttccaaagcgtccggcccgagccagcatggcctcgtcatcgatgccgcccacggcaactgcggcaaagacgaaaaccgcgaagccgaagtcatcgaagagatcgctgagcgcctggcgcacggcgaacaaggcatcaccggcgtaatgatggaaagcttcttggtcggcggtcaccaaaagccggccccgctcgaccagttggtctacggtcagtccgtcaccgactcttgcgtgccgtgggaacgcaccaacgaactgctgcacaccctagccgacgccgtcaccgctcgccgctcggctaaatagctttgtctttgtaaaaatgctcactgagacccactcagtgagcattttttgccaataacggtggtcatgtcagtttgttcccgtgacaccctatccttgggaaggatactgacccaaggagagatgttatgcagcagcaggaggaagcagcacattcgctgcatccgttgcaagtcggtccgcagccgttgaacaccccagaagagcttcgcgccattcgccaggcgatgggggaggggaagaacccgctcgttgccactgatgtgccgcgctgggaagatcaggtgggtgtcagtcgcatcatcaaccgccgcgtattggagttggagccgctgcccacgcccgcgcaagtgctcgctgaactcccgctgactgatcaggctcaggaaatcgtcgcctactcgcgtgatgagattcgcgcgtgcctgtacggccaagacgacaggttgttggtcatcgtcggcccctgttcggttcatgacccgaaggccgcgctggactacgcgcgccgattggccaagctgaaagatgagctcggtgaacagctgctcatcgtcatgcgtgtgtacttcgagaagccgcgcactaccatcggctggaagggcctgatcaacgacccggatattgatggcagccacaatattcgcaagggcctgttgcttgctcgcaaaaccttgcttggtgtgctgaaggaaggattggcggccgccacggaatttctggagcccaccagcccgcagttcatctcggacgcggtgagttggggcgccattggcgcgcgcaacacggaaagccagatccaccgccaattggccagcgggctttccatgccggtcggctttaagaatgccactgacggctcggtgaaggcagcggtcaacggttgcttcgccgctgctcagcagcacacgttcttcggcattgaccatctggggcgtgcctgcgcagtcgagacccttggcaacccggactgccatgtggtattgcgcggctcgattcacggcccgaactacgatgccgaatccgtggccaaagccatggaagacgtacgcgccgaaatgcccgccgaatccgccgcttcgcatggtctgattgttgattgctcgcacggtaactccggcaaggacgaacatcgtcaggccgaagtcgtgcgcaatattgccagcagaattgcagctggcgaacagggtattaccggcatcatgatggaaagctttattgaaggaggcaatcagaaggccgcgccgcttgatcagctggtctatggcaagtcgattactgacaagtgcatcagctgggaagaaaccgaggccttgctgcgcgagcttgcggaagccgtagccacacggcgttggcactgagttgcgtcatcggctctctcgcgggagcaatgcaacgaaacgtctctacccctcagcctgccattcggcggccacctcccctgacaaggggagccgaaagtgttatgaaaggaacttacgtatgggtatgaaaactgtagctattattggcgcattggatgaggaagtggcgctgatcgccaaatcgctcacgcatgtgacgcacaccgccaagggcagccttgacatcgtgtccggcacggtcgactccttcggttctgacgtcatcaaggttgccgcaacggtaggcggcatgggactggtcaatgcggccgccaccacgcagctgctgattgacgagattgccccggacgccgtgattttcagcggcatcgccggcaacctcaacacccacctgcacatcaacgacgtggtgctcggtggcaccctgcgctacctcgacactgacatgcggctcgtaggccagtggaagcccggcactgcggacgctccggtggaggaattccactctgatgaccgtctgctggaagttgccgacgaggcgcttgccaatgcgggcattacccacatcaccggcatcatcgcctccggcaactacttcgtggacacgccccaaaaggtcgaggaggtcatccgactcaccggggctgacgccgtggagatggaaggcgccgccgtggcacaggtcgccgcccgcaatgacgtgccggcactggtgattcgtgccctttccgacaacgccgacaccgattacgaggtgttcaaggatttcgacatctccgaatacgccgataccgccgcccgtctggctgtcgacatcgtcaagcgcctgtaactggtcacctccaagttcggcgttgccggtgtgggctggtacatggccatcatggccgccctcgctctgctcgctctgttcctgatcaaggaaagcaaggacaaggactacgagctgtaaatagagctccccatattatgctcccgccagcgggagcattttgttatgtcgtcccgccaaaaatgaacaatagacgaacttacgtagtttaggcatctcactacgccttgcacgttttactctggaaatcatggatatctggcagatcgtcgtgattgtggtgctcgccgcgctgatactggtgtgggttgccgtcatcgcctacaacaaaggccgcgtttcaggccggcttgccgccgaacaggacctgtccggcgacgaggatacgcattctctattcggtgatgatgcgcccgtgcgccccaccgagcgtcgcctgattgaagtcctgcccgaagccctgatcgtcaccgaccgcaacggtctggtccaatattcaagccccggctcagtgccattcggcctggtctccggcgaccgactcaactcgcgcgaagtcgaggacatcctcactcaggccgccgccgacggtggcgtgcgtgagcgtgaggttcagctgccggtcaatcgcaattcctatccgtcctctaatggccgaggactggaggccggccagttacgcccgtccaacacgctgtatttgcgtgtgcgcattggcgatatcggcgatgacctgtacgccatcttcatcaacgacatgtccgagcagcgccgtttcgaggccgtccgccgtgactttgtgaccaacgtttcgcacgaactcaagactccggccggtgccatcgcgctactggccgaaaccgtgaccgacgccgccgatgatccggacgccgtacggtatttttccggccgtatctccaaggaatccgcgcgcctgaccgaactggtgcatcatcttatcgacttgcagaaagcccaaagcccgcaaagcgtgatcgatgcgcggcgcatttccgcgctggatgtggcacgcgccgccatcgccgccaatcagacccaagccgactcccgccatgtggatatccgactgagtgtcaacggacagtcagtgcccacgaaggtcgaggagctggccgatggtgaaggttccttggaagaatcaggcagcccagccacgaacggtccgatgatcaaggccgacaaagaggccatgcaaaccgccgtcaagaacctcgtagagaacgccatccattactcgcccgaacacaccactgtggcggtcggtgtgggggagcgcgatggcaaagtcaccatccgcgtggtcgatcagggcatcggcatccccgccaaatcgctggaccgcattttcgagcggttctaccgggtcgacccggcccgttcgcgcgagaccggcggttcgggactcggcttggccatcaccaagcactgcgtgcaggagaacggcggtcggatttcggtctggtcgcgtacgggggaggggtcgacgttcaccatcgagctgccggccgccccggatgaggatgacgacgaggcccggccggacgagtcgacacaagtgtagggccttggttggtggccgatatggtgccattccattgccacacaatcacacagtaggcgaggtgcgcacaccgcgcgtagcccaattacgcaattacgtactttcgggaaacagcaggctaacggagaacaaatggttacgataatgtcggaaaactttgcgcctatgcgcacgggaacatacccaagaaaggctactatgacacgcattcttatcgtcgaagacgaggaatcctatcgcgagccgctggtataccagctcacacgcgaggggtacgacgtgtccgccgcctccactggcgaggaaggtctggaactgttcaccaagggcggcatcgatttggtgctgcttgatttgatgctgccgggcattgacggcactgcactgtgccgtcgcattcgtgagcagagccgtgtgccgattattatgctcaccgccaagagcgccgaaatcgataaggtcgttggtcttgagattggtgcggacgattatgtgaccaagccgtactctttccgtgagctgctggcacgtattcgtgccgtgatgcgtcgcaatcaggccgctgcccaggcttccggcactgtggatgacgatattccgctggtgtgtggcgatatcgccatgcaggttggccagcatcaggtcaccgtacgcggcgaaaccgtgttcttcccgctcaaggaattcgaactgctcgaatacctcatgcagaacaagggccgtgtgatgacgcgtcaccagctgatcgaccgcatctggggttcggattatgtgggcgacaccaagacgctcgacgtgcatgtcaagcgcgtgcgctccaagatcgaggaagatccggcgcaccccaagtatctgactaccgtgcgcggtctcggatacaagatcgatactcccgcggagtaaatggaaggcggccttcgggtcgcctttttttgttgtggattgtgggctcgctgtggactcgccgcaggcgagcccgctccaaaaactacgtagcctcaacgtagcccacaaacatccaagtgttcatcttctgtttactgatttcggttttgggcccttgaaaccaccaatacgcttgtagttgtcatgaattgaccgggcagcgctgagccgcccgcgaatagttgatagagggattaagtaataatcatgcagaagaacatcctcgttcgctccattgccgctctgtccggcattgtgatgctcgcttccgtggccgcctgcggcgataacactgccgccacgaccgacaacagctcctcctccgattccacttccaagtccaccccgatctccggcaacttctcgggcgccggcgcctcctctcagcaggccgctgttgaagcttggatcgccggcttccagggcaccaaccctgaggccaagatcgcctacaacccgtccggttccggcgctggcgtgcagaccttcctgaccggtgccaccgcttgggccggctccgacaaggcccttgccgatgacgaagttgagcagtccaagtccgtgtgcactgaaggcaccgccttcgatgtcccggtctacatctccccgatcgccgtggtcttcaacctcaagggcgtttccgatgccggcaagcacatcaacatggacgctgccaccatcgccaagatcttcgacggcaagatcaccaagtggaacgatccggccatcgccgatcagaacaaggacctgaagctgcccgacaccgccatcaccgtggtgcaccgctccgataagtccggcaccacccagaacttcgtctcctacttcaaggacgtcacccctgacaactggacctacgacctctccgagaactggccgaacgaggttggccagggtgccaagggcacttccggcgtgatctccaccgtcaagcaggccgacggcaccatcggctacgctgacttctcccaggtcggcgacctgggcaccgtggccgtcaaggtcggcgacaagtacaacgagatttccgccgaggccggctccaaggtcattgcggattccaagcaggacgacaccgttaagggtgacaaccgcatcgtcatcaagatcaaccacgccaccgaggccgagggggcttacccgatcgtcctggtctcctacgacatcgtctgcccggcctacaaggacaccaagcaggctgagttcgccaaggcttggctgacctacgtgacctccgacgagggccagaaggccgctcaggatgccgccggcaccgctccgctgccctcctccctgaagtccgagatcaccaagtccatcgaggccatcaagaccaagtgatgacgtcggcccgcaagggtcgtgtggactggacctgacaactgaacgatagactgtagtagtaagagcagtcgccgccaactttaagccgcagtcgtaagccatacggctgcggcttaaagcgggtcaggacccgaacggtttggcaacgtcacagacgaaaaccgcaccacttgaatacttgataaccaccctatataaggagaatccgtgagttcgcaagacaaaacggctgtgcagccagttggtggcaagaccgccgacaaggtgtttcgcggtgtggcatacgcctgcggcatcctgatcctggttgtacttgccgctgtgttcctgttcctgttcttccgcgcctggccactcatcggtggcgatcaagccgccaacagccagaccgtgtccagctttaccggcggcaaggccagcagcttctggggctacgtgctcccgctgttgttcggtactgtgctcgtgtctttgctggcactgctgattgccttcttcgtgtccatcggcattgcgctgttcatttcgcattatgcgcctaagaagctcgccaccgcgctgagctatgtggtcgatttgctggctgccatcccgtccgttatctacggtttgtggggcggcctgattctggtgccggccatctacccgttctggaactgggttgccaaccacctgggcttcattccactgttcgagggcccggccgccaacccgccgcgcaccgtcgccaccgtggctgtggtgctcgccgttatgattttgccgattatcacctccatgtcccgcgatatcttcatgcagaccccgcgcctgcacgaagaggccgcgctggcgctcggcgccaccaagtgggagatgattcgtctggccgtgctgcccttcggcaagtccggtatcgtgtccgcctccatgctggctctcggccgcgcgcttggtgagacgatggccgtgttgatgatcctgtccccgggcctcaactactccatcaagctgctgcaggcctcgcagaaccagaccatcgccgcgaatattgccgcacagtaccctgaagccaacgatctgggcgtctccacgctgatcggaactggtctgattctgttcctgatcacgttcgtggtcaacttcatcgcccgtaagcttaccgagaaagcgactgcgtgatgactgctgctgagaacactgaaaagactccgatggacggcgcgcccgaaatcgacttcgatcgtttccgcccgacccgttccgccatccagcgccgtaatatcatggaccacttcatgtgggtcctgatcgcggtggcgtttgtgatcgcctgcatcccgctgatctccctgctgtggaccactatcgtcaacggcatcaagcgcctgaacctgaacttcctgagctacaacatgaccggtgtggtcggtggtaaccagaccccgtccggtggttacggcggtgtgctgcacgccatcatcggtactctcgaaatcaccgctggcgctatggttatctccattccgatcggtttgatgtgcgccgtgtacctggtcgaatactcgaaccgcggcaagctcgccaccacggtctccctgctcgtcgacgtgatgagcggcatcccgtccatcgtggccggcttgttcgccttttcgatgttcacgattctgctgggccccggtaccatcaacggtttcgaaggctccgtggctctctccctgctgatgttgcccaccgtggtcaagtccagcgaggaaatgctcaagatcgtgccgaacgatttgcgtgaggcttccttggctctgggcgttaccaagcagcgcacgattaccaagatcgtgctgcgcaccgctctgccgggcatcgtctccggtatcattctggccatcgcccgcgtgattggtgagaccgcaccgttgctgatgaccgccggctacatctccagcaccaacgtgaacctgttctccggccagatgaccaccctgccggtgttcgtctaccaggagtactcgaagctcagcgcgaactgcccgcccaacgccgacgccacctgcgtgaccacgattccgatggaacgtgcgtgggctgcggctctcgtgctgatcgtcatcgtgctgctgctgaacctcattggccgaatcgtggcgaaggtcttcgccgtcaagaccgagcgctaagccagtcgctaagcctaggccttaagaacacaaggaaatataaggaaacatcatgggacaacgtattgacgtcaaccacgagaacatctactacggcgactttctggccgtggaagatgtgaacatcagcatcgagccgaacaaggtcacctccttcatcggcccgtccggctgcggcaagtccaccgtgctgcgcaccttggaccgtatgcacgagatcatccctggcgctcacgtcgagggcgaggtgctgctcgaaggcaagaacctgtacgacaaggacgtggatccggtggccgtgcgccgcgacgtcggcatggtcttccagcgcccgaacccgttcccgaccatgtccatccgtgagaacgtgctggccggtgtgcgcctgaacaaccaccacctggccaagtccgacgccgacgatctggtcgagtgggctctgcgcggtgccaacctctgggaagaggtcaaggaccgtcttgacaaccctggcatcggcctgtccggtggccagcagcagcgtctgtgcatcgcccgcgccgtggccgtccacccgcaggtgctgctcatggatgagccctgctccgctttggacccgatttcgaccctggctatcgaggatctgatcgacgagctcaagagcgactacaccatcgtgatcgtgacccacaacatgcagcaggccgcccgtatcgccgactacaccgccttcttcaacctgaaggccgtgggccagcccggtcacctcgagtacttcgcggacaccatgacgatgttcaacaacccgcaaaacgaagaagccgagcgctacatctctggaaggttcggctgatcgtttcctgcgcgcagcgtaatgatttgtgcgtaggagaaacggcaaagcccgccgcaaggcgggctttcgcatattcagagcgagtattgccgagtattaccgttctcgtaacggagcgagctggaatacttcgtcagactgggcggcgatttcccgcttcggtcgatcgacgggagaacggcggtaaagcggtacaagacaagtccgcacgatgaacactctgtgataaattttctgtttacgtgcgagtgtggaagaatggtcgcagcaaggtctagcaaaggagcataggtgagtactggtccgatcgtcagcatcgttgttgtcgttattatcgttgtcttgattggttggggcgtcagcgcctataacaacctggtgacgctgaagaaccgtgtgaagaacggttgggcgcaaatcgacgtgcagttgaagcagcgcgccgacctcatcccgaacctggtgaataccgtcaaggggtacgcatcccacgagtctgaagtcttcactcaggtgaccgccgcccgcgccggcgtagtggctgcggccagcaacccgagcacgaccactgctcagcgcgccgccgctgaaaaccagctgtcccgcgccctgttcaacctgcaagccacggctgaggcatatccgcagctgcaagccaaccagaacttcatggatctgcagaaccagctcaaggaactggagaacaagatcgcctacgcccgtcagttctacaacgacgtggtcctgaagctcaacaccgccatcgaaaccgtgccgacgaacatcatcgccggtttgttccactttgaacaggcgcaatacttcgaggccgatgatgcctcccgtcaggtgccacaggtccagttctgacccgctccaggcccgtccggtaagccgccggccgggcccgtattgtcttaagagagggaagatatgtggatacgattcattcgcgccggaatcgtcagcattgttgccacggtggtgttggcagttatcaccttggcgataatcgggacttccgcgttcggcgattcggccgacctcagctaccgcacgctggactatgacgtgaccgccaccgcgaacggtgatttgaaggtcacgcagcatatcgacgtcaagatgcgtgagcgtaccgacagcgacgacaacaccaagccgtggaagcaactgtttcagcaatacacgctgaactccggcaccctgaccgatatcagcgatatcagcgtgcgcaacgtcacagacggcatcgactacgcacaacagagcgagcccaagctgcccagtgacgtcttttccgacaaggaatggaacagtgactacgccaaccattggtatatcgccgatgtgagcgatggcagcgaccatccaaaggcatacacgcccggtaccgatggcctcaagcccagcgcctccgccaccgaagataacacgaccgtggagatcggctggaatattccggtcaccaccaaggccgacagtatgaagttcgacgtgagcttcaccatgcacgatgtggccaccaaatggaaagacgtggcctccttccaatgggagccgttcggcaagaagaaccaagtgcctatcggcacggtcaccggcaccgtccacttccccaacggcatcaccggcaaaacctcatgggcatggctgcacaccgagcgcacttcggaaaccaagcgcaacagcgacggcagctacacgttcacggcctacaacatccacaatggcgactacctcgatgtggtcgcggcgttcgatgccgccaaagccaagggcatcgcccgcaagggaaccggcaatcatctcaaggacctgaaacaggacgaatataagcaacagcagcgctggctcgacaagcaacgattcgctgccagagctcgtctcgtgttctggattgtcagcatcgtgctcggcatcgcgttgtgcgcgtggggtatctgggctgtgatctccagcaaccggcgtgcgcaataccgtggcagcgtcgaatactggcgcgaccagcccggcatcagtccggcttccgcagcccgtctgattcgcgtggtcgatccgtcgacgcgccaatccgatgaagaccgccagctgaccgccaccatgctgtcgctcgccgtcaagaaggccattgccgtctatccggggccgtcggacatgtatcgcggcatcgacatgagccaggccacgccggtgggcttgagccaaatgattgccgccgaccaaggcaagcagtatgcggcaggcatcaccagcaccatcgtgattctgccgctcgccattgatgaggcacccaacgcgcaacagttgggattgagcgaatcggaagatgcgctgctgaacctgctcatcgtcatttcgcagcgtgtgggcagcccggtattcgacctgaaccagatgaaggtgacctgccagaactggcaagacggctatattgagctcggcaaattcaccggtgcatgcagcatggaataccagcggctgggtgccacgcgctctgtgggctggcaatggattctccccggcgtactggccgtcgtgctgggatttggttcgctgctggccaacagctttatcggatacccggtggctggtcttatcgagctgccgatattcctggtcggcctgttctgctcgatggccggcgcggtgaccgtgctcaccgaccaaggccaggatatcgccggccggactctgggccttaagcgttatatggaagacttctccaacttcaccgaccgtggtaccgccgatttggccttgtgggattggtatatggtctacgccgccgcgtttggcatttccgatcgcgtgatgcgtgagctggccaaggcctatcctcaggtcaacgatccggcttggctggatgccaacgcctccaactcgttgttctactggaactaccgcccgtatggctggtacagccaccgccataatgacgatgctgccgggcagatggacccgggcattagcggcccagctccggcttacggaggcacgtcgtttgccggcggattctccgacctcggctcgcagctgaactccggactcgctgacatcagctcgaccatcagcgcggcagcaccatccgctgattccggtggcgatttctccagcttcggctcgggcggcggctccggtttcggtggctcgttcggtggctcgggtggcggctcgttcggcgggcggtaaatccagcgttctgcttacgctggaatcggacacagaccgtctcattactgttgaagggaatcaccatggcattgttccgtaacctcggaccgttctccaccaccgccatcggccacggcgaaatgccgctgaccatcgaaaacaatcgtggccacgaggtcggcatcgaaaccctgcatgcctcgctggacgccggctgccgtcacatcgacaccgcttgggcctactactgctccggcggcgaagaacagaccggtgaaaagctggtgcgcgaggcccttgagacctggaaggggccgaaggacgaggtgctggtggccaccaaggtgggccacttccgcaacttcaccgacggccgccccacgtgggatgtggacggtcgtccggagaatctgattcgtcgcggcaaggagagcgcgctggcgctcggcgtggacaccattgacctgctgtacttccaccgccccgatccgaaggtgccgtacaacgagtccgtcgaagccatcaagcagctggtggacgagggcgtggcgcaggaggccggtatctccaacgcctccatcgagcaaatcaacattgcgcgcggcattctgggcgacaagctcgtggccgtgcaaaaccagtactcgccgattcacctggagacccaggacacgctcgactactgcgccaaggttggcttggccttcgtgtgctggagcccgctcggcggctaccgtcacccctatgatgagaccaagttcgacccgttccgcgaggtcgcggcggcccacggcgtgagctaccagcaggtcgtgctggcatgggagctcgccaagggcgaccacatgttcgtgattcccggcgcgcaccgtcccgaaaccatcctcgactccctgaaggccgaccagctcgaactcacccccgaagaactcgccaagctcggctgaactttctcagctccccttgtcaggggagctgtctcgcgtagcgagactgaggggtagtcgccggagtagtcccgggtagttccacaaggagataattgtgcgcaaaaaactcatcctcgacctcgataccggcatcgatgacgcgctcgccatcgcatatgccctaggcagtgccgacgagattgatttgatcggtatcacggccacctacggcaatgtcgcggtgccgctggccgcgcgcaacgcgctggcggtactgcacttgttcggccgtgacgacgttccggtctatcccggagtcgaccatcccatcgccccggcaacattgccgaaaatgcgtggcaccacaccagacgagcgggcccaggcctacgcgcgctggcagaacggcggcgcggacggctggcaaacggacgcttcgtggtcaccaactcccggctcggtggcggtccaccatcccaacggcatcggtggcgcaatcatccccgactccccgcgcgctccggaagcaccaggctcggcggtcgatttcatcatcaccgccgcgcatgaatacggcccggacctgaccatcgtacctacgggcgcgatgaccaccatggccaccgtattccgcaacgctccggacctgaaggattccggtgtgaacgtgacgttgatgggcggcgccctcacattgcccggcaatgtaagcccggccgccgaagcgaacatctcccaagacccagaggcagcagactatctgttcaagtgtggcgcacgcaccaccatgatcggcctcgacgtgacccaccagaccgcgctcactcgtgagaaagcccatgaatgggcgtctctggggacgcaggccggcgactttctcgtcaccatgaccgactactacatcgacttctacctgaagaaccagccggagattcgcggatgtggactgcacgacccgctggccgtggccgccgcgctcgacccatcgctggtcacgaccttcgggttcaacttgcaagtcgatctcgagggcccgttccgaggccgtaccatcggcgatcgttcacggctccaggaccccgacaaacacacccaagtcgcattgggcgtcaacgtgccggaattcctcgaccgtttcatgacccgcgtcaccgcggcggcccggtgacgcggacggcggccgtccggtccgctccacgccgtggatggatatgacccatggcgtggagcgcccttttgggaaccgacagaacatagggggggcgctgcatgcgcagcgccccccctatgtgtcagatcatgccgcagcccggaatcaggccgccgggcggatcgagcgtgagatattgctcctccagatcgatgtcggggaccaaggcctccacgaacgggaccaacgcggtcttttcgaccacatcctcgcccttggaattctggccggttaccaccggctcggtcaaacgaatcttgagcagggattgggcgggggagtcgatcacatccaccactttgccgaccacttggccggcgggcagtcccagaccgttgccctcgactagacgggcctcaaggccaataagatccttgggataccattcgtcggcctcgagcatgtcctccgcatcgtcgacctcgccgtagagttcgacaccgtttagggcctcggcggcattgcggtcgtcgacgccctcaagcttgagaatccaacgatccttgaacgtgcgcgaaccctcgacgatgtactcggtctcgccatcctggctgtagagcacggagtccggctcgaagcgccactcgggatcatcggtgtacaggcgcacggtgacttcgcccttcaggccctgtgcgcggccaatacgagcgaccctcagcaactcgagctgctgagggtcgtcgtgcatgtcttgctgtgccatgctgtgaatcgttccttatcggttatcgacggacgtccatgatgtcaacgcggaccttgtggtcagacagtgcctgaatcacggtgcgaatcgcgttggcggtgcggccgccacggccgatcacacggccgatgtcttccgggttcacgcgtacgcgaagcagttcgccgcgcgcgttctcatgagacttgacggaaacatcgtcgggaaaatcaacgatgttcttgatgaggtgttccacagcttgtgcaagcatagctagcctttcgtttccgctcaggcctcagccggagcttcttcggcggcctcttcagccggggcttcctcagcggcggcagcggcttcggcttcagccttggccttggcagcagcttcggacttggcggccttcagcttctgagcctggtcctcaacggccgcgatgcgggcctcggcgtccgggccagcctcaacggtcttcagggtgccttcggcaccttcaaggcccttgtacttctgccagtcgccggtgatgttcagcagcttgaagacgggctcggacggctgagcgccgacgccgagccagtactgagcgcgatcagacttgatctggatggtcgagggctgggtgttggggttgtaggtaccgatctcctcgatgaccttgccgtcacgcttcttgcgggaatcgacgaccaccacacggtagaaggcgtagaacttcttgccctgtcgcttcagacgaatcttggttgccaaaatggctctccttgtaatgctaggtgtgcgggttctcggtttgccatgtggggcatggccgtccggaatccacgtgtcctcgcggctcggggtgtagagggcgccacgcgcgcgcgaataactggcctattatagcgcacagggccggactgggcgtggcgcactgtggttgcggtgtggtgcgcgttccccgttgcgcaacattccggggaatgtatcgcgaaaatgccggctatcgcagtgcaagcgttgcggtcagggccagatgatcagtgccctcgacctcaaacgacttcacgccggacggtttgagcccgggagtgaacagcacgtgatccagctcgatgcgcggccacttgagccagctcgggaaggtgagattcgggccggcggcttgaatcagacttgcgtccttgaatccggacttgagcaacgcgcggaagctcggatggtcggtgctcgagttgagatcgcccataacgacgacgatattgcgattgctgacggattttgcacgggcgagttctcgcagacccagaatgccggccgaccaatccgcgcagccgcgcatcggcgatttcgggtgagccgaacaaagcgtcaccgtgcgattaccggaggttttgagggtgatggcgggaacgtcggcggcggggatggagaccacgttgggcaccgctgcgctcggctcgtagcgggaatagatcacgttgaatccgccattatcggtctctttggcgtctccgaactgatggtaggggagaagttcgttgatgtcggcttcggtaagacgtgtgatgaggtcgtcggtgacttcctgcaaggccaatacgctgatattgcgttcgcgaatattgcgaatgatttcagcggcgtcggcgcgtccgtatcgacaattcatcgtcataaccgagaactggggcgagagtgtttcacgcgttgtttcacagtgtccatcggagatggtttcgggcccttccttcggagtgtttgaggtacccgatgtattgctgttatggctttttgacagcgtcggcgaagttgtttcacgggctgtttcacggtgggattctttgcgtttcccggccgggtcgattgacgtaccccagtagttgatgcgctgtgagctggcaatcagcgcgaccacaataagcaacgacatcgcagtccattcatgttgccatgcggcgaccgcggccagaatcatcaaaggaacccacaacagcggcgtcagggcaatcatgtacggaagcggcatacgggcctcgagaccggcgggcagcgcgcttaaggtcgtccataacagtgcgatgattgccaccgcgctgaggattgtcgtcatggaagttcctttcgaaatataaattgaaccgagatataatttggctcccctctgcgaggggagccaagttgtgagatcagcgaccgaacagtccgccaaggcctccgccgaggttcggcggcagttcagtgccaccgtcgacgttgcccatcatctgctcaaggccagcgggcagggccgggttctgtggcttcttggcgaaggcggaaccgccggtcgaaccggaggacttgccggccagcttatcgcgcaatgccttctcctcggcctcgcgcttcatcggattgccggacttgccgcccttcttcttgttcttgcccttcttcttgccgccgcccatagccgggccgccgaagccggggatgccgccgcccatgccgccacgattggacatgcgcttcatcatctttgcggcctgctcgaaacgctgcagcaaagcgttcacctgagaaaccgtcacgccggaaccataggcgatacgggcgcggcgggaaccattgataatcgacggatcgcggcgctcggccggggtcatcgagcgaataatcgcctcggtgcggtcgatttccctctcatcgaactgctcgagttccttgcggtgctgggccatgcccggaatcatgccgagcagcgacttcattgagcccagcttgcgcacctgctgcagctgatcgaggaagtcgtccaggccgaaggaaccttcggagattttctcggcggccttgcgggcctcttcctcatcgaactgcttctgcgcctgctcgatgagcgtcatgatgtcgcccatgtcgaggatacgcgaggccatgcggtccgggtggaagacctcgaagtccttcaggccctcaccgttggaggcgaacaggatcggcttgccggtcacggacgccacggacagcgcggcaccaccgcgggcgtcgccatcgagcttggagagcaccacgccggtgaagtccacgccttcgtcaaaggccttggcggtcttgacggcgtcctggccgatcatcgcgtcgatgacgaacaggatttcgttgggacgcacggcatcgcgaatgtcgcgagcctgcttcatcagctcctcgtccacgcccagacgaccggcggtatcgatgatcaccgtgtcgtagagcttctgcttggcgagttcgatggaatcgcgggccaccttcaccgggtcgccggaggtctggcccggagctgcgacggcctcgccgccatcggattggacgcccttttcgggagcatagacgggcacgccggcgcgttcgccgaccacctgcagctgcgtcaccgcgttcggacgctgcaaatcggccgccaccagcagcggcgtgtggccggaatccttgagccagtagccgagcttgccggccagcgtggttttaccggcaccctgaaggccggcgagcatgatgatcgtcggcgggttcttcgcgaagttcagcggacggtcgacgccttggccgagcacgtcggtgagctcctcgttgacgattttcaccacctgctgggcggggttgagtgcgtcggacacctcggtgcccagtgcacgctcacgcaccttgccggtgaaggaacgcaccacgtcgagcgccacgtcggcgtcgagcagcgcgcggcggatttcacggatcgtgccgtcgatatccgcctcggaaagcttgcccttgctcttcagatgcttgaacgcattcgagagtctgtctgtcaaagatgaaaaagctgccataatgggcaacagtctagccgccacgcgggaaattgcggtgttggggacgacgcttttcggggaatgtgccgcgtagtagtcagggatgttgggcattcagacggcaaatgccgtgccgtccgctcgtggcgaagccaatcgagtgcttccgataccatggaaaccgtaaagaatcctgtgttttttggaatacttacgctgttttgaaaatcgctggacaccgcttatacgcagactgccgtgcgctccgaaccatgacgttcgggccaacgcagacatgccgtgcaataaggaaggcccactgatgcccacccaaaaactactcgaacgcaaagccctgatcgttggtatcgtcatcaacgtgctgcaggtcttagccggcatggccgtgttcttcatgaccggtctcaaggccatgttcctcgacttctccttcaccgcgatttccgtcctgtccggaatggtggcggtgtacctctcgtcgcgcacggtgcgaaccaccgagcgcttccccaatggcatgttcgcactggaacctatctacgcgatctgcaaggccattttcaccatgtcgttgttggtgtattcgctgattgacgtgtgccgagtagcgtacgactacttcgtgttcgggtccggcgaacgcattgaaaccggcccggtggtcatctacgagatcctgaccgtaatcgtgtgcttcagcctatacacgtattaccggcgctccaaccgatccatcggcgattccagcaccatgctcaccgccgagtgcaagagcacgttggtcgacggatcgatgtcgttcggcatcggcgtagttgccatcttcctgatgctgctaccggccggcggtccgcttgacttcctgcactacaccggcgatttcttcatcaccgtggctttggtggcattgaccatcaaggagccgttcagcgtgctcaaagaggcgttcgtggaattggtcggcggcgtgcatgacgacgatgaaaccaacgcctacgtggaggccgaggcacagcgccatctgcctgccaacaccgactacgagcagacgctgatcttcaagaccggtatgaactacaccgttgacgtgtatctgagcggcatcggcgaaaccattgatgtagctgacctcatcgaatgcaagcgctcgctggaaaaggagctcagcaagcgcctgcacatcgtggacgtggacttcgtgtttgactgattgatgggtttgaagcgactacttcagactccaagtggaaccctgcgggccgtcttcgatggcgatgccggcctcggtcagggcgtcgcgaatctgatcggccttggcgaaatccttggccttgcgagcttcggcacgggcgttgagctgttcggcgatcagtgcctccagcgctgcatgctcgggcgactcggccgtgccatcagcggcaccgccggcagcgccggcggacacccacggttcggccagcgggtccaggcccaaggtgtcgagcatggcacgcacggcgagcagcgcctcacgcacctcggccttggcggtttcggaatcggcgcggtcagccagctgtgaaagcaacgtattgccggaacggatggcggtgaagatcgcggcggttgcaccagacacattgacatcgtcattcatggcggccacgaaatcggcgggcaaatcgtcggcggagacggcagtgacttcctcgcgagaaggctgtccacccagcgccacaccggcacgctcgatgaagttcgagacgcggtcgtatgcggcctgcgcctcgaccagcgcctgatcggaccattcgagcatcgaccggtactgcacggagcccagggcgtaacgcaccacccaagcggaatgctcagccaacacgctcggcacggacaggccggtgcccagcgacttcgacatcttctcgcccttggcggtcacccatgccgaatgcatccagcgcgcagcggaggggtagccggccgcacgggtctgagccatttcgttttcgtggtgggggaagcgcagatccaagccgccgccgtgaatgtcgaagccatcgcccaggtaacggtgggacatggcggagcattcgatgtgccagccagggcggcccacgccaaacggcgtcgaccaacgggcgtcctcgggatcggtgtccttcggagccttccacagggcgaaatcacgcggatcatgcttgtcgggggaggcatcggccgggtcgaccggattgtacttgtcggcaccggtggcgtccacggacgggcccatgcggtcggccacggcggcggcctcatcgacttcggaggtctgcttctggtgagtgagttcgccgtaatgcggccaggatgccacatcgaagtacacgttgccggtgggcttgccgtccgcatccgtgaccacatagccgtgaccgttgtcgagaatgcgctgaatcaggtcgatcatgtccgacatgtggccggtggcgcgaggttccacagtgggcggcagtacgccgagcgtgttgtatgcctcggtgaattcgcgctcgtagtaataggcgcgggcccaccaacgctggcctgcggccgcggccttaacgagaatcttgtcgtcgatatcggtcacattacgcacaaaagtgactttgtagccgagcttcaaaaaccagcggcgcacgatgtcgaacgccacggcggcacggatatggccaatatgcggtgacgattgcacagtcgcgccacacacataaatgccgacttcgcccggcttgagcggcacgaaatggctgacctggtgcgaggcggtgtcatacagattcaggccttctgcggccttggcaacatgcaccggcgtcaggcttgaaggcatgacggaaatgttgaaatcctgcggttcttggctgtttcccataacactcaagcgtagggtccgaaccagacatgctgaatcgttactcgaagagtttgatgaacgcttcacaggtggggcccgaacgaggtgacagacggatgagaagcgggacaacagtctcgcgagaacacgtctttgaccgctgcggaaactgcgagattcatggatttgccctgctcgttacgcaaacggggaacgctcgtgccacaatagaagtcatggccacaccacaagtgctcattttgcaacatgtcccatgggaacgcccgggacgcatattgtcgaacctcgaggacatcggtcttgagacggtgacgatgaatatcgtcgacaaaaagaaaccggacttgcctgatttcggcgaactggctggcgtggtaatcatgggtgggcctatgggcgcgcttgattacgacaagtatccggggctgaaggcagaagccaagttggcgcgtgccgccgtggcttcaggcaagccgattctcggtgtatgcctggggcatcagattatcgccactgcgcttggtgcgcagctgcgcaagggcgatgcgccggagattgggttcgcgccgatcaagcgtgtggacaagcatgacttcttctccatgtgggataagcagctgacagtgctgcactggcataacgacgtggtgggcctgcccgcggaaggccagctgctgtcgcgttcgtcttccaccaaggtgcaggcattccgactgggatccgcgctgggcatgcagttccacctggaagtgtgcggctcgctgctggacgaatggctggatgagccgagcatggtcaaggatctcaaggccgcgggtggttccaagtcccaattgcgcgagcagttcgcccaatacgaccagctactgcaaccgctcgccgagcaagtgttctccggttttgcggcccgctgcaactcctacgctcagacgctgaacaaataacgtttgcgggccgccgctgggcaagcgtggcgctacattggtgagtcatgccgacttatgacattggactggaacacgtttcgctcgctttcgctaccaaaaccatcttcactgatgtaacgcagggtgtttttgaaggcgaccgcatcggcatcgtcggcaagaacggcgacggcaaatccacgttgctgcacctgttccgcggtgctcaggagccggattccggccgcgtgacaaagcgtggcggactcacgttcggcatgcttgaccagcgtgatccccttgatgacaacgccaccattcgcgaagccgcacttgaggggcgcgccgactacgaatgggcgtccgataacacttcccgtgaaatcgtcgaggcattgctcggcggcatgagcctggatgccaaggtcggctccttgtccggcggccagcgtcgccgcgccgatttggcccgactgctgctcaaggattgggatattcttgcacttgacgagcccaccaaccatctcgacgtggtcactatccactggcttgccgaacatttgaagaaccgctggtccaaaggccagggcgctctgttgctcgtgacccacgatcgctggttcttggacgaggtctgcgaatcgatgtgggaagtccacgatggcgtgatcgagccgttcgagggcggctattccgcatatatgctgcagcgcgtggaacgcgatcgccaagccgatgtgcgcgaaaccaagcgccgcaatctggctcgcaaggagctcgcatggctttcccgcggtgctcgtgcccgctccaccaagcagaagttccacgtcaaggccgcacgcgaattgattgccgatgtgccgccgatgcgtaacacacttgaactgaagcaaatggccacctcccgtctcggcaaacaggtggtcgatttggtcgacgtgacgcagattttcgaaaaaccgcagggcatggccgatatcgacccggatgtggcggcgctctccgcgtccgcttcccgcgtggatgtggtcaacgccatgtacgccgagccgcagctgcatggttccgttgaggtggcggtcaccgacatgactgacccgcgcctggtggacgccggcgtgccggaagccgtcgagtccgctgaggaagcgcgtaagaaggccgaggctgagagcggcaatccgcagcttgctgacgatcgcgaggttcgtcgcatgaacacgggtggtgaaaccatcggcggtggcactgctgcaacggattcggatgatgacactgctgcagccggtgtcacctcggctgcacgcaaggtgacggtttccggccgcgagattcttgacgatgtgacttggctgattggcccgggcgaccgcttcggcatcgtcggtgcgaatggtgccggcaagtccacgctgcttaagttgattgatggcacactcaccccgaccgcaggccatgtgaacattggcaagacggtgaagttcgcggtgctctcgcagcgcctcgatgagctggagaagctcggcaagtacaagatcaaggaagtgctttcccgctataagccgagctacattgtggatggcaaggaagtgacgccgggacagttgatggagcgtctcggcttcgaatccgcccagctgatgacgccgatccgcgatctctccggtggtcagaagcgccgcatgcaactgctgctgattctgcttgacgagccgaacgtgctcatcatggacgagcccggcaacgatctggacaccgatatgctcgccgtgatggaagacctgctcgatacttggccgggcacgttgattgtggtctcccacgaccggtacctgctggagcgcgtcaccgatcagcagttcgcgctgattggcggcaaagtacgtcacttgcccggcggcgtgcaggactacctcgatatggttgaggctattaagaacggcaagggattgccggctgacacgcctggcttcgcgggcaccggtagcagctcggcgaagtctggtaagggtaaggcggccgccgtcaacgctgccgcatctctccctcagtccgcttcgcggatagctccctcgtcagagggagccaataacggtgaggactccacctcgaagctcaccggcaaggccttccacgaggcatccaagcgcgtgaatgccatcgaacgtaagctcgctaagcttgaagagcagaaggccgatctcgaggcgcagatggccgcccatgacccgagcgactacgagggtctcaacaagctcaatgaacaactcaccgccgtcaatactgaaagcgatgatctcgaagccgaatggctcgaactctccgaacaattggagtagcgggagaaaccgtaacgttcacaaggcctcggcagtttgccggggcctcccgctatgcaaactcccacggattaatcaattccacgtcggtaccttcgaagtccttgatattgcgcgtggctatggccgcatcccaggaacaggcaattgccgcaatcatggcgtcttgaatactggtaggtgtgcccctgtgttcgcgttcgacaaggatatgggcataatccgcagctgcctgagtgtcaaatgcgaacgttctgtcctctaatgtcataagcgccagcttgacggtcgtatctgtgtactttcgtcgtttgccttcaggcatgcgacatattccggccaacaactcggcgacggtgatggcggtggttgccaaattgcttgtatcttggttcctcagccaattggcaacgtgttcgtctggctgtttcttgatgatttcgctgatgacgttggtgtccagaataatcatggccgattcctattcaaaagatactggcggtcgggaatcggcggaatttcgctcggatagtgggagttcccccttgtcgagtccctcaaaatccatgttcttcatgaattcgcggatctcgtcatagaaattggtctttcgcgtgatttcatgcgccaccgtgccagccagccattcttcaagaatggatcgcacctgagattccatggagcggttgtttttctcagccacttctttgagctgctgaatctgctcatcgggtatttttcggatggtcaatgttgccatgatgcacctccttgttgctgtcataatgctagcatgaggtgctgtcgttttgcttgcagtacgggtgatgaggtatgcacgcatgaaaaaaggcggatatgcatcatgcacatccgccttttgagcttggactgggtcttcccgcagtcgccgaatcagcgcccggtaacctcggaaccgacgaccttttcgctcagggcgcgcgggccgcgggtcacggctacggcaccggagcgcaccagctcaatcacaccgtaatgctccaaaagccccagcagggcgtcgatcttgccttcggcaccggtggcctcaatggtcagcgattccggattcacgtccaccacgcgcacgcggaacagacgcacgatctccagcacgtcggaacggttggattcgttggcggccaccttgatgagcaccagttcgcgttccacggtggagttcgggtcgagttccacgattttgagcacatgcagcagcttgttgagctgcttgatgatctgctccagcggcacggcctccacgtcggcggtcaccgtgacgcgagagatgtccggacgctcagtgggggagacggacagcgagttgatgttgaacgcacggcgggcgaacaggccggcgatacgcgccagtacgcctgggcggttctccaccagcacggacagcgtatgacgctgggaaccaggctgggatgcaggatagttagccatgagtgttctcctctcctcagtgctcgctcgcagtggcagcggcggtctcgtgctcgaacacgccggtcgcatgctcgtccggaccggttcccggagccggggtgccgccagccagcggcttgatgccgggcttgtacgtcacctcgtcgttgggggcgccggcggctaccatcggccacaccatcgcatccttccacacgcggaagtcgatcagcaccgggcggtcgttgatctggttcgccttttcgatggcggcaatcgcctcttcctcggtgaacgcgcggatacccacgcagccgtatgcctcggccaacttgatgaaatcaggcacttcgagcggcgcatcgccgtcggccagtgccgactcgccgtcgacgccatgcgcctcgccatcgagcaggttggtctgcgagtagtggtgctcgtagaacagcgtctgccactgacggaccatgccgtatacggagttgttcagaatcgcgatcttcaccggagcgtggtccaggaacgcggcggccagctcctcagaggtcatctggaaggaaccgtcaccatcgatcagccacaccggcttcttgccctcgaactcgcgggccgagcccacggatgcgccgatggcggctggcaggccgtagcccatcgtgccgaggcctccggaggagatccaagcgtgctggttctcaaaatcgatgaactgcgaggcccacatctggtgctggcccacaccggtcacccagatggtggacggatcggccatctcagagagcttcttgatgacccactgcggggccagcgatccgtcggtcggctcatcccacgtcatcgggtattcctcgcgccagccgtcgatcgccttccaccagggggccagattcggcttgccctgaatggcctgcgtacgctgaatctcgggaatcaagtcgtcgagcacggtagccacatcgcccacgatcggcacgtcgggctgacggttcttgccgatttcagccgggtcgatgtcaatgtgaatcacgcgggcggtcggtgcgaaggcgtcgagcttgccggtcacgcggtcgtcgaaacgtgcaccgatggccacaagcaggtcagcgcgctgcacggcgccggttgcggcaatcgtaccgtgcatgcctagcatgccgaggttcttcgggtcggagtcgggaatgatgccgcgtgcgggcagggtcgtgaccacgggagcgccggtcaggtcggccagagccttgacctgtgcgccggcgttggagcgggcggcgccgccacccacatacagcaccgggcggtacgactgagagaacagcttcgccgcgtcggacagcacacggccgtgcgccttggtggtggggttgtagccgggcagaatcatgcgctgcggccatgagtagtacatgtcgccggtctgtgcggtcttggtcagatccacgaccaccgggccggggcggccggtgttggcgatgtagtacgcctcggaaagcacgcgaggaatgtcctgcgcgcgggtcacgaggaaggagtgcttggacaccgggtaggtgatgcccacgatatccgcctcctggaaggcatcagtgccgatggcttgcacgcccacctgaccggtaatcacgaccatgggcacggagtccatgttcgcgtccgcaatggccgtgaccacgtttgtggcacccgggccggaagtcacgatgcacacgcccaccttgccagtggccagtgcgtagccttcggcggcgtggccggcggcctgctcgtggcgcataagcacgaagcggaacttcgtgttgtctttgatctcgtggtagacgggcagaatcgcgccgccaggaatgccgaagacgtcctcgacgccgaggtcctccagcgaacgaatcagcgcctgggcgccagtcatcttctcgccatcgacgatggtctgcttatcgggggccgtgttgattttcggtacaccgctgaatgcctgcaaaggcgtgggtaaagccatgattcctctcacctcataggttttgtcgcgaacctgcccgaccttgggatggggccgggtgcccgcgtgtctgattccagtcgcttccccgagacttgtggccccggcgcgactcgtcgctcatgttggtattagtctattcgcaaatccgacagcgggcttacttagtccgcgtcttgaacgagtccagtgacttccagcccgcttcggcggccgccagctgcgccttacgcttgctggagcccttaccgatgccgatgatgtcgccgttctcgcccaatgagacgcgcgcggtgaagatctgcgcgtattccgggccggagacctccatatggtagacaggctcctccttgccgaggccgtgcgccttgacggtcagcgaggtcttccagtcaagtgccgggccctcggtggccacttcggcgagcgtgtcgtcaataagccggtgaatcaccttgcgtgcctcgtcgatgccgtgttccaggaaggtcgcgccgatgagcgattccacgatgtcgcataggatggagttcttctccgcgccgccctgctcggcttctccgtgacccagcagaatgtaggggcccaccttgagcttggttttggcgatggcgctcagcgcgtcttcggagacggccttggcgcgcatcttggccagttgcccctcggtcatatccgggtgaatggtgaacagcgtttcagtggagaccagttcgagcaccgcgtctcccaggaattcgaggcgttcgtaattggccacgccggggtgctcatgcgagaaggaacggtgggtgagtgcctgcacgagcagatccgggctgagagtggtgcccaacgcttcaagaagctcgttggccggcgtcggctgctgtggggtttcattactcatgattgttgtatggtccttcacgcgatggtgatgtgttgtgttgtgttgtgttgtttgcgatgcgatggtgtacgcaatggtgcacttatgcgaagaccccgccacccgtcgatggcagggccttcattcaagccgttatcgcaggactcacttggtgtgagccggctggatggcggagcggtaggtgcggccgcggtagttaccgcagctcgggcaagccatgtgcggcagggccggagcgccacagttcgggcagttcacggtcgcagcagcggtggccttccagttcgcgcgacgcgaatgcgtgttggcgcgcgaggtcttgtacttaggcagtgccatttgagtatcctctatttcgttcgaacaattgagcttaagcgtccgttatcttaacgcacggctcgtacaaacttcgttcaggcgcgcgtcactcggcctgctcgccgttctgctcggcctcgagctgggctttgagccccgccaatccggcaaaacggatatccgtcacatcgtgatgatggtcgggatcctcgttcagatcggcaccgcactgcgagcacagacccctgcaatccggtcggcacagtggttgcaacggcagcgattcgaccagcgtgtcgcggatcatcgcctcgatgtccgcgaatgcgccgttctccagcagcggatacgtgtcttccgactcgtcctcgccggcgatgatgtcgatttcgtcgtccttcttgctcttgccgcccttgccgttggccttgtcctgacccgactcgtacgggaagaacaccgtcacatcaaccggccagtcctcgtcaatcggcttcaggcagcgcgtgcactcgctgacgaatggcgcgaccaggcggccggtgaagatcaggccgtccacaatcgaatcgaactgcccgctcacgtgtacgggctcaccttccttgatgccgacaatgctgtcgccaatgccggaaggtgccgggaaatcggcgtcaatcggcttggattgaccggcgcgcgaagcaatctgcgctaccggaatggcccacggggaatcttcaactcgtgccatggtatgttcttggtgcctttcgtatgttggctggagttattcgttactggcgttattcgcgttactgatgttgccggcgttgctggcgttactgggcttcgggatagtcgttcagcgtcaggtgcggcatctgttcgcgggccgcgcgctggcgctcttccagcacgttaagaccggcctgcacatcctgactgagtttgccgagctgctgggacagcccttccatcaccgtagtgcagtactggtccgcgccttgggtcagatggtcggctttggtctgtgcctggtcaagaatcgcgcgcgctttctgccgtgcaagctcggtgacgttctcttggccggccaggaactgtgcctgttcgttggcgtccctgatcatgttggctgcgcggctttgtgcggaggcgacgatggcgttggactgggtctgtgccgattccagacggcgctcggcctcgcgcatgagggcggaggcgcgctccaactgcaccggcagcattttcttcaactcggaaagctggtcggtgaattcgtcgcggtcaaccttcaccatgccgggggcgaatatgctggacttcgcttcgcccagtgccgcctcgagctggtcgatgatgtcatacaccgtggtgaattcctcgtggctcttgaccgtggccgggtcgtcgtccgtggtttctcgcaggtcgggcatttcgttcatgaacgaggggcgaatgccggcggcctgagcggtctgagcctgtgcccgggtctgctgagctgcttgggcctgcgctttggcctgcatttgtgccggagtaggggtaggcgcggcgggcggcgatccggcgagaacatcggcctcttcggtgggtgccggcgcggcttgcgtagacgcgggcggttccggggcggacggctccggagtggacgatgcggcgtccgcattcggtttggtcagatcgacgtatccagtagggtggtcatcgctcatagtcattagtgcatcagtccttccgctgacgttcctcggccagggcatcggccagcatcggcacgacgcaatcgggcaccatgccggtcacgtcgcctccatggcgggccacgtccttgacgatggaactggagatgtgttcaagaatcggatcggccggcaaaaacagggtttcgatgccagcgagcttgcgattgaccagcgccatgccgagctcggcttcatagtcgccgttctggcgcagacccttgatgataacggtggcgccgaccttcttgcagtagtcggtgatcaggccgtcggtggaagaaacggtgacgttcttgcaaccggctttgtcaagggcgcggcggatcacgtcgactctggtggcttcggaaaacatcggtgttttcgcggcgttgacggccaccaccacatgcacctcgtcgaaaaaccgcgccgagcgctcgattacatccaagtgtccggcggtaacggggtcatacgagccggggcatactgcgatagtcatgctttatagcctaccgctagtggtgtgcttcgtgctgccgagcgtgcattgttgtcgcgtcggcgtatgaggcagtgtgtgcggtgccgtatgtggcgtcggtgtggcgtcgtgtgcggcattgtatgtggcattgtatgtggcggggtggcgtgatgcgcgacatgggtgtgtggaggtgtgcggattacgcgccaatgggtttcgcgggtaacgacgggaatctatgatggagtgcagtcgaatcgttgaatacgaggaaagaagtgcaccatgacttttgccgagatgttcgttgatgatgccgaaccgctgcgcaacccggaccaaggtgccggcacgtcggtgctggagcgtccggagaccaaggagtcgccggttcgtgacgatggtggcgacgccgatcgttttgcgcactacgtatccaaggaccgtatcgctgaatcgcgtgcgaccggccgcccggtggtggccctgtgcggtaaggtttgggtgcccaagcacgatccgtccaagtacccggtttgccccgactgcaagcggatttacgaggaaatgacgcgctaaaggtggtacttggctcccctcagcgaggggagccaaaatggtcaccgagcggaaatctcgtcgatcagcttgagctcctcgtcgctgaagtgggtgttcttcagtgcgccgatgttgtcgagaatctgctgcggcttggaggctccggtcagcacggaggtcaccttgccgtcgtgcagcagccatgccaggctcatctcggccagcgtctggccgcgttcggcggccagattgttcaggtccacaacctgcttgtgcagtttctcggtcagggcggaatcgttgaggaatcgcggatcgtgagccatgcggctgtcggccggaatgccgttgagatagcggttggtcagcaggccctgagccagcgggcagaaggtgataaggcctttgcccagcttgaaggcggtctctttcaggccgttcttttcaacggtgcggtcgaggatgttgtacttgttctggttgatgatgaacggcacgtgcagttctgccagaattgcggcggccttttccatcgtcggaccatcgtagttggacagacccacgtacagggccttgccggagttcacggcctgagccagcgcgcccatcgtctcctcaagcggggtttccggatccgggtggtggtggtagaagatgtccacataatccaagcccaagcgttccagcgactggtcgaggctggcgagcaggtacttgcggctgccgaggtcgccataggggcctgtccacatttcgtagccggccttggtggagatgacgagttcgtcgcggtgatgcttgaagtacttggcgagcagcagtccgcagttcttctctgcctggccgggctcggggccgtagttgttggctaggtcgaagtgggtgatgccgttgtcgaaggcggtgaagaccagggacttcatctggtcgaatggcgtgatgtcgccgaagttgtgccagaagccaagtgagacggccggcaacttgaggccggaggtgccggcacggttgtaggtcatcgtgtcgtaacggtgcgggttgggggcatagatggcggttggctcgaacattgagtctccttacaatgtcattcttgttcttacgaatgcttacctgcgatgggcagaccgacgccgattgagcggtattcgtaagtgttcttggatactatggttccagttcaagtgaacttgaatgcaaacggctgcgatgcttcggcgtgttgccgcagtaaggagtcatgatgtcctacaccattcgtcaggtggccacgcagttccatatgcagccctctacgctgcgctattacgaggatcagggattgctgaccaacgtggagcgcaccgaaaccggccagcgcatatacgaagactgccatatcgaccgtctgcgcgcgatttgctgcttcaagaacgccggcatgaccattgacgatcttaaaaagttcttcgtgtatgagtccaatgagcccgagcatatcgatgaaatccttgatctgctggaatctcgccgcgaatccttggacgagcagcgccgagccctcaacgaggcggccatgcacgtgcagcgcaagctccattactatggcgacatcaagcgtgccatcgacgccggtgaagactggccggattggcgcgagtacaaaaaccgcgcctattccattgaatgctgagaccatcgaatgctgaaaccatcgagtgctgagctggatgccggctgggcactaagaccgatgcgcgtcgatcgtgggcgcgtctatccgagtaaggccttgctcggcagtgcgcggtcgagcagccagacaacgagcgatatcacgaagaacgctatggccagcttgccgcagctaatgccgaacccttgccagccgagtgcgtcgaggttgatgaagtcgtacggatacggactgccgccggccgccggtccggaccccggccaaatcgccgcacgggccagcacgaagaccaagtatgcagggaagtacgccagccacgagaacatgtaatgccagcggaaacgccggtgcgggtcgaatagcacgaaatcgataaccgccataatcggggcgattttgtgcagcatcgtattggtcatgatgccaataacctgtggcacgtatgccgggtcgtccggaggcatcaggaagaacgccaccagtgcggtgactatggcgtacacagtcaggcaccccttaagccatgcaggcggctgaatacctttgagcagtgtggccgcgccggaccacagcatcacgatgcccagcacgaaaccggtctggaacgtgaaatacacccagaactgcggtttggaccatgcctcatatgtgcccacgaagcagaaaccggcgatcgcaaagcgccacaacgccacgatgaatctcatgcatcgagtctaccgcttcgccagtgggccgtatggtgcggctggcgtattggctggtcgtgatgattatggtcggtgtgaccgaccgccatagtgccgatggatatgacgatactgaacccggcaatatcgaatctggcgatacgagaataagacgagcccttcccgcacggctttgcccggactacacttaggtgcaacttcaccacttatgtaggaaaggccttgcaatggtcgattattcgccggctctgatgaccgacatgtatgaatacacgatgctcgacgccgctctgaaagacggtaccgccgaccgcaagtgcgtgttcgaggtgttcacgcgtcacttgcccgaaggccgtcgctatggcgtggtggccggcaccggccgcattctggatgcgctggaacatttccacttggatgaagcggatctgaagttcctggccgaccgtcacgtggtaagccccgagaccattaagtggctggagaacttccacttttccggtacgattcgcggttaccgcgaaggtgagatgttcttcccgaactccccgattttgcaggtcgaaggcacgttcggcgaatgcacgctactggagacgttgattctatccgtgctgaactacgattccgcagtggcctccgccgcctcacgtatggcgtcggcagccaaggatcgtccttgcatggatatgggcggacgccgcactaacgagtgggccgccgtggccgccgctcgagctgccgtagtgggcggattcaagggtaccgccaatctgctggccgcccagctgtatggtctgaaggccatcggcaccgccgcgcattgcttcacgttggtgcatgattccgagcgtgacgcctttgaatcgcagatcgaggcattgggcaagaacaccacgctgctggtggacacctacaacatcgaggaagccgtgaaaaccgccgtcgaagtggccggtcccgaactgggtggcgtgcgcatcgactccggcgacctagccgccatggcccagcgtgtgcgcaaccagctggacgccctgggtgccacgaacaccaccattaccgtgaccaacgatttggatgagtacgcgctcgccgcattgcagaccgcgccggtcgactcctatggcgtgggcaccatgctggtcaccggctccggcgctcccacttgtgcgatggtgtacaagctcaccgagcgtgaaggcgctgacggcacgatggttccggtcatgaagaagtccaaggataaggccacagtgcccggtcgcaagttggcattccgctcctacgaatacgcgctagccgaagccgaacacgtgatttccggctcggaagagaagctggccggtttcacgcccgaaccgacgtggaagaacctgctggtcgatttcgtggaccacggccatatcgatgcgcagtggcagggccatgacgccatcatggccgcccacgactaccacgccaaggcgttgtccgaactgcccatcaccgcgcagagcctcatgaagggcgagccagtgattcctacggagactcaggttctctgacgagaactttcgtctccataggaatccgtcgcagcatagctgctccccttacctacggacagcccactgggctgtccgcttaacggttcgaccacagagaccaaagtcctctggccgtatctcactggccgcatccctctggttacattggctactcttccctctggatgagtgaaactctcaatggtgataacgcggcgggcaacgatgacgtatcagagcggcgcgatgtagttcgatgatggttgacgagttgctatccaggcatagagcggatggcgtatgctggggcgcatggttgaaatcaaagacatgcttggcaatcaccaaataattcgtgccgacggccgcaaggtcgacgaactgcgccctgtgcgcatcacccgccacttcaccgacgcccccgaaggctccgtgctcatcgaatgcggtaacacgcgcgtgatgtgcaccgccacttttactcccggtgtgccgcgttggcgcaaggactccggcctcggctgggtcaccgccgaatactcgatgctgccgcgtgccaccgccgaacgcaccgaccgtgaatccgtacgtggcaaaatcggtggccgtacccacgaaatcagccgactgattggccgctgcctgcgtggcgtcatcgatatgaaggcgctcggcgagaatcagattcagcttgactgcgatgtgcttcaggccgatggtggtactcgcacggcttccgtaaccggtgcgtacgtggctttggtcgacgcagtcaattgggcggagaagcaccgccatatcaagtccgccagccgcgtgcttaaggactatgtgtccgccgtatcggtgggcgtgatcaacggcactccgatgcttgacctgccatacattgaagacagtcaggccatgaccgacatgaacgtggccatgaccggttccggcaccttcatcgagattcagggcaccgcagaacaccgtccgttcaaccgtgccgaactcggcaccctgcttgacttggccgaaaagggcaacaaggaactgcaagccgcccagcgtgccgctctgtccctagactaagccagctcccctgacaaggggagccttcttaaaggagaacctcatgcaaatcgtcgtcgcaacccataacgaaggcaagcttgtggaaatccgccgcattctcgaagaggatcttggcgcggatgccgaaaacatcgaactggtgtccgctggcagccttcacctgccggatccggtggaaactggcgtcaccttccaagagaacgcgctactcaaggcccgcgctgtggccatccgtaccggtctgcccgctgtcgcggatgattcaggtctcatcgtcgatgtgatgggtaacgctccgggcattctgtctgctcgctgggcgggtgctcacggccacgacaaggccaataatgcgctgctgctcgcccaaatcgaagatattccggatgacaagcgtaccgcgcgcttccgttgcgccgccgcgctggtggtcccggacaccgagaccggtgccgacgtgaccggtggagtggctgccgacggtatcaccgttcacaccacggctgccgatgggagccctgccccggtgcatgcccgatacgccatcaagtcggagacagtggagctcggcgacatgccgggtcgaatcatccgcgaggctcgtggcgaacacggtttcggttacgatccgctgtttgtcccggacgatcagcctgccggtcgcgtcagcactgagcctgaccatgaaggcgagccgctgaccagcgccgaaatgactccggccgagaagaatgcgatttcccaccgaggtaaggcgctgaaagccttggtccccgccatcgaggccctgctgcactaagtcatctagactgtctagctgcactgagccgcgactaagccatagttgagtcgcggctcagcactcagccccccgaatcgggcgagtgtctagcaagcgcctatgacctagcaagggcgatacgaaagaaggccggcgcttagtgcgtcggccttcttgatgaagaagagccacccgatagaatcgaactaccgaccttcccacgaacgagggggatgctctaccactgagctaaggtggcgtggcttcaagagccaagtagagaatatagcactgcgtctagtttggcgcaagctggataacggtgaacgcaatcgtaataagaggatacgaggctccaatggcgaatgctgatgtgcgcagtatgcaaatgatatatagagaatgatggatactgcttcttggccgatgagcggccatgctagcatgagggatttggatagcgagttggcatgaggataatgaggattaggcatgcgtgattttgaattggtgaagctgtcagaggatgaattcgacaagttttcggcgtgccatccgcaaggcaattttcagcagacctcagcgatgggaaccctgcgtaaaggggagggcaaaaccgttgattaccttggcgtaaaggaacatggcgagcttaaggctgccggattattgcagattattcatgccggtggttccacattcgcgctgattcacgatggcccgatgtgtgatttcgacgataaagaactgttggcgttctttgtaggcaaactcaaggagtatgccaagcagggaggtgcggcacagctcgacatcactcccgaagcggtctatcagctgcacactcagaaaggggaacttgaaggctccgcagacgacgagatggttgccaacctgttggctctgggcttcgaccatgttggcggtttctccacgggatacacgtccgtgcctcgctggcgttgggtaaaagaccttaccggcattaaggacgaggctgcgctgaccgcaagctatgcgaaataccgtcgccgcaacgtgcgcatcgcgcgcgaatccggcgtacacacccgtcgtcttgaacgtgatgagctttcgctgtttcatcagctgtgcgaattgagctgcgagaagcagggctttgagaatcgcccactgagcttcttcgaggaaatgtacgatgcgttcggcgataacatcgagtatcgcgtggccgagattcactttgacgagtatctgaaaacctggcaagacaagctcgacaaattgaatgccgataaggcccgtatccagaaagatcttgaacgttcgcgtaccgataagcgcacgaatcagctgaatcttcagcttgcctctgtcgacaagaacatgcctcctgttgtgaagcgagtccaagaagcgcatgatctgcttgaccaatatggcgctgtagtgccgctcgacggctccatgttcctgtatcatccgcgtgaagtggtgtgcaccacgagtggtgccgatgagcgattcgacaagttctacgcgcccgctttgatgcatcacgagatgatggtgaaatgcattgaacgaggcattccccgctacaacctctacggtatcaatggactgtttaccccagagaataatccgggattcggagtgcttgaattcaagcagcggttcaatgggttcgttgaagagatgcccggcgaattcgtgttgccggtcaagccgcttgtgtatgccgcaaaacagctggcgcataagctgttgcatcgctaatcctatacacaagaaggtctcgcagtatgcctcacactgatatgtctgctccgtcggcgcacggctcattcaagccggcattcaagccggtaaccatcacgccagaggagctggatgcatgttccgcctcccacccacagggcagtttccaacagacgaccgcaatgatggaagtcgctcgatcccgtgtggattcgttcgatatggtgggcatccgtgatgagaacggcacattggtggcgggctgtttcatcgcctacacgcgtggccgtttcggcctggagggatccgtttggctaggcccgttgtgtgacccccatgacgtgccgatgctcaaggcgatgactggctgtattagcgattcggcgcgtcgtcatggtgccatgtctgttacctgttggccgaatttggtatatcagcgtcatgactcacagggtgcgcccgagggggagccagatgccgcagcactgcatgcctatgaatcgttgggctggcggcatgcgggttttggccagggctatggttcggtggtgaatcagtgggtatacgtcaaggatttgaccggtatcgccgatgagaaagcgttgctcaagtcttatgacaagcgcacgcagtggagcgtcaagcgcgcgcaatcgatgggcgtcactgtgcgtgagcttggtattgacgaattacagtcgtttgccgatattgagacagccacggctcagcgccgccatttccaagatcgaggcgttgcatatttccgtcagttcaagcaggcgtttggtgataaggcgcattttatgcttgctgaaattcacattgacgactatatggccgatatgactgccaagcgtgaggcccttgccactaaggttgcacggttgcaggccaagaatgccgaacatccgacaaccaagaccgaacgtcagcttggtgaagaaacccgtaatttagcggcggctgagaagcgtctggcggaggccgctgaatttgccaaagacggtgatgtactaccggctgcggcgtcgctgttcgtggagcatccgaatgaagtggtgtacttcttctccggcagtgtggagcgttataagccgttctacgcctcggcgctgattcagtacgaagcaatgctgcatctatgtgtggagaagggcgtgccccgctacaacttctacggcatttccggcgtgttcgacgatccggacgacgaggggcgcggcgtgctggaattcaagcagggctttaacggctacgtcgagcagatggtaggcaaattcacgttgccggtggataagttccgcttcggcgtgagcaatctggcgcacaagctactgcgccggtagcaactggcggtcgggggacgagcctatgtgggctgcgtctcgtttgaccgtgcacccgccgtgtgcctacttgcgcatttgctcacacgcccatcagcgcgtgagccacagccatcatccccagtgaaatcatcgcggtgattgccagcgagaagccggccagtttggcgttgccgagtactttgtcggtgaacagcgtggagaaaatggcgatcggagccaacgcgcagatcaccatcacggcgcgaatcgaagccgagaacggcagcaggaaccacgcgatcaacgcgaaggcgacgctgaacggtatacgccaagcgatgacggccatgacttccttcacgtcatgcttggattggggcaggtccatgagcatgcccaccatcagcatcgacaccagcgcgttggcgccgctcaatggctgggttatagaggcgatccaatcgggaatcttcacgttggcgacggtcaacacgatcatgagcagatacgtgtcgaacggcaccgagccgaagaagctcttgccgatggtgcgcagcaatgcgcggcgggcaagccgtttggcgtcgcgatccttgggcttttcgtacggtagggtgggagccgaaccggcgtgttgttcggcaagtgttttgccgggctgaatatgcagcagttgctgggtgagcacattggtgccggcggccaccatcacgcagttgccgatatcgaacatcgcagccggcaccaccgcgcccgcaccccagaatgactggacgaccgggaaagaaaaacagccgagattgaagccggcaccgttgagcatcaggaaggcgcggtcggtcacattgcgcttgcgggtggccagaaagatgaacacgaccgggataaaagcaaacaggaatgcgaataccgaaataagcagcagcgagatgtcatgcgaattggtggcgaacgagtatacgatggcaccgggcagcacgatgttgaattccgcggtttgcaacacacgataatccttctgcccgaacaggccgaaccgcttgaacagatagccggtgagaatgatcagcaacaggccaaccggcgtaagaatggcggacatacacttctctccttgactcacacaggctcatggcgcacaggctcagacccgcaatgctgtggcccattatatttgccgccttggcattgccatatgtagaggtgtccgcaagggcttgcagctgccgcgcgcatatacgaaaagcctcccggaagcgttggcaatccaatgcttccaagaggctcaagccggtgcgcgagatgggacttgaacccacacgtcaaagacacaggaacctaaatcctgcgcgtctaccaattccgccactcgcgcgtgcatatccgcgtttccacaggtgtggaagatatgcaaaaccctaggtcggacagccattacagaccagccagcctagggcatccgagccacttgtcagaatcgaactgacgacctgctcattacgagtgagccgctctaccgactgagctaaagtggcttggttcgcggaaggcatttcgccagccgcgcacaagaagttaagtataagacatccccacgaaaagtccaatcggcggattggcggttgtgtcgcgaccgctcagtcgaagatgacggttgcgccgcgccacgaactgttcgataatgcaaacgatggcaatccgacatcgctgactcattttgttctgttcatgtccgaatttgtgagtattctgtttgctgatacggagcgcatccgagccgtgtgcaagggcgctccagtcactgatgaaaggaatggaatcctatggccatcaatccgcccgttgacgccacccagacccctgagtgggctgccctgcagaagcactatgacgagcttcaggtcgaaggcgtgagcctcaagaagtggttcgccgaggacgccgagcgcgtcgagaagctgtccttcgacgccggcgacctgcacttcgatctgtccaagaacctgatcaagccggaaaccctccagctgttcgccaaccttgccaaggccgtcaagctcgatgagcgcaccaaggctatgtacaccggcgtgcacatcaacaacaccgaagaccgcgccgtgctgcacaccgcgctgcgccgcccggtcgaagacgagggcaagtacatcgttgacggtcaggacaccgtcaaggacgtgcgcgagacactcgacaagatctacgctttcgctgacgacgtgcgttccggcaagtggaccggtgtgaccggccgcaagatcgagaccgtggtcaacatcggcatcggcggctccgacctgggccccgtcatggtgtacgaagctctgaagccgtacgctgacgctggcatctccgcccgctacatctccaacatcgacccgaacgacctggccgagaagaccaagggcctcgacccggagaccaccctgttcatcatcgtctccaagaccttcaccaccctggagaccctgaccaacgctcgcgaagcccgcacctggctgctcgaagagctcaccgccaacggcgccatcgccgagggcgacgaggctcagaaggccgaggccatcaagaagcacttcgtcgccgtctccaccaacctggagaaggtcgaggagttcggcatcgacccgaacaacgcgttcggcttctggaactgggtcggcggccgttactccgtcgattccgccgtcggcacctccctggccgtgatcttcggcccggctcgtttcgaggagttcctgcacggcttccacgagatcgacgagtacttcgccaacaccccgttcgagaagaacgtcgtggtgctgctcggcatgctgaacgtctggtaccgcaacttcttcaaggttgcttcccacgccgtgctgccgtacgaccagtacctgcaccgcttcccggcttacctgcagcagctgaccatggagtccaacggcaagtccgtgcgttgggacggcacccccgtcacctccgagaccggcgagatcttctggggcgagcctggcaccaacggccagcacgccttctaccagctgattcaccagggcacccagctcattccggccgacttcatcgcgttcgtcaacaccccgaacccgaccaaggacggcgaccaggacgtgcacgagctgttcctgggcaactacttcgctcagaccaaggctctggcattcggcaagaccgctgacgaggttcgcgccgagggtactccggaagagatcgttccggcccgcgtgttctccggcaaccgtccgaccacctccatcttcggtgtggctctgaccccgttcgcactcggcgagctcatcgccctgtacgagcacatcaccttcgtggaaggcaccgtctggggcctcgactcctacgaccagtggggcgtcgagctcggcaagcagcttgccaagcagatcaccccggccatctcccaggacgacgacgccctcgccgcccaggacgcctccacccagagcctgatcaagttctaccgcgcaaatcgcgaattctgatctccgctcctgcgtcgcttcaatcagaactcgcggttggcgcgccgcgctgtgttgtttgatggtcggtctggcgaccgtccatggcgcgagttctgattcgtcggttcggctctagcagatgaactctgatacgcatgtgccccggcatcttcggataccggggcacattgctatatattccgtgcgacgttatatctataacctgtgaactgggggtggtgttccgggtcaatgagatcagccgtagtaaaccgcttcattgcagtattcgggggtgcggatgtttttttggagactggacgaaaggattatcgtatgtccggtcccggggaacgacggcgcgtggtggacttgtattccgccacgccgatggccgcggcccgggtggccgagcgcctgggttatccgaccgggcagtgcctggaatgccggccggcaaaggatcccgggtatgccggccatatggcgaaatccatcatcccgctggagacggggaccaaggcgatcgaaccggtgccgggcagcatgcggcggaagcgggccgccgaactgctcggcgcgggcgtcggcgcggtccacgaccgggtcaaggcgtatcgcgggggcggtgtggccgcgttgcggcccgaaaacaggaactccggccaacccaaaacaccgacttgactaaatacaacttgcgcgtttgctgtactgcgccatgaagaggttctcatcccggtcggggagtccaaaaaacgtcaccacttcggtgcagccgctcttgccttacgaactttgctgaaacttgatatgtctcctttagcttcaattcattccgttattctgattattgagtttgcgcatcatctatattgcctgttatccgagcagcggagattgcatatcataagaggttccgcgagatgtaccgaaacggttccgcactagggttgatacgccgatacttccacacctaggaatattctgaaatattcttgtgtcttaacgttgatgtcttagcaaagggaaggaatacgcatggcgagctcgtacggtgcggaagcgacgcagggggagcggtatcggctttccttcactgtcggcggacttcttgcctcgcagggccgggcgcttgcggaaatgtatctgaatcatctgaatcatgcaggcggcggcgacgctgagtgttcttcccaaaccgaggtgggcaagtccattgccgcgattcgccaacaggccatcgaggaaaacgttcttgcgattcgcacggattccgcgaacaggcgcgttgtggcggaaactactaggcgactcagtgcgctcacggttggagagcttgcatatttggcaggcccggattcctccacatccgaccgcgaggcacttatgtggatcgcgatgtgccgttattacgcaatcgtcggggaattcgccggcgaagtacttaaaaagcattatcttaccggcaatacgcatctggactttgaggattatgatcggttcattgcggacaaagccacatggcattctgaactggaaatcgtaagcgagggaacggcgaagaaacttcggtccaatctgttcaaggccatgagggaggcacatctgttcgataaaaattccggcacggtgttgtctttccttcccagtccctctttggcggatattcttagaaagagggcggattcgttcgggtatcttccgatgcgcgaatcgtcgttatgagcagaacggaggatagcatggctgattccatcgccgatattggatttgtggatgagcgtcgtgacattgatgctgatttcgctcatttatatgagatcatggagtcccgttcattccggaccaacagcgggctggcaggagaacagccgtattacatctatgactacccgcccatgcaggagcttgaagtcgccgagcatatcaagcagttggcgaatcgtctgcagacgatgacgccgaaaaatgatggcgattacgctccgcaagtgcttacgttggatttgtacgacattgctttggagattcttgagaagcgtggcattttggatcgcatattcaaaagggaggaaaaacgccacaaaaaggtttcatcggatgttcacacggataacttcttgagattgctcgacaatatactgggggccgatgcgaatcatctgcccgataccattcgtgatcattacgagcaggccaagagcgaaggcggggccgatatcgtgttcattacgggaatcggcaaggtttatccgtatattcgtgcgcatacactgctcaacgcgttgcaagggcgtatcgatgatcgcccgctggtactgttttatccgggtacgttcacaagaagcgctacttcaggatcggtcatgtcgctgttcaactgtttgccgggagacaattactatcgtgcgcaaaatctgcgtgagatgagcgtgcagctggaagcatagcggtttaaaggaatgtcctgtcagctgcaacatggcaagaggcaggatttgcaagtattcgttcaaagaagaagggacacaaatgaacggggaaaacggcatcagtttcaaggagctgttcagcaaggacattgaccgcaacatcaatggtgtgatcaaggccaatgatgagaaaaatcttaacgatgaggtcaacgagtatgtgcttacggaggagatttgccgcaatctggccaaattccttgacgcatacaacgacccgtcgaaccacgaacagaacggtgcatggatttccggtttcttcggttccggtaaatcgcacctgttgaagatgctgtcgcatattctgggcgaggtcccggctgaactcgttgacaagggcaataagccgaccatgagtcgcgaacagattgttcatgccttcatgggcaaggccgaagcacaggatgaccagatgcttgcaggtcagcttgaaaaggctttgacgataccagccacgtcgattctattcaacatcgatcagaaggcggataaatccaatgcctccgacatgctgctgtacgcttttgttcgcgtattcgatgaggcgcgtggtttctacggcaagaatccatacgttgcgaaattcgaacgcgatttggcgagcaatggttatttcgaggatttcaaacaagagttcgaacaggtggctggcaaaccatggagcgaaggccgtggtgaggccgtgctatgggatgatgagatttgcgaagcctatgccgcggtgacaggcaaaccggagcaagacagcatcatccaacggtacgaggatacgtacacgatgacggtcggcgacttcgcagacgacgtgaacgtgtggctgtcccgtcaggaaccgaaccgccgcatcctgttcctcgtggatgaggtaggccagttcatcggtgagaacagagaactcatgctgtcactgcaatccatcgccgaggatcttgccgtcaagaccaacgggcgtgcatgggtggtggtcacttcccaggaagacatggataccattgttggcgatcggaccaagcaacaaagctatgatttttcgaagatccagggcaggttctccatcaagctgaagctcaacagcgccgacgtggtggaggtcattcagaagcgcttgctgaccaagaaaccggaatatgagtcggtgatgaacgagctgtgggatgaacagaatgcgaacctgcgcaccatgttcgaattcacgcgtgagacttcgaaattcagtaataacaaggcatacagcaaggacgatttcatcgcatcgtacccgttcgtgaactatgagttcgagctgttccagaacgtgctgcgggagatgagccggtacaacatgttctccgggcgtcacgcatccgtgggtgaacggtccatgctttccaccatcagcagcacgctgcggtccagccagaatgagacggtcggggccctgatgccgttcgacaaactgtacgacggcatcgccgacgccatccaatcaacctcgaacttccgcatcaaccaagccgaaaagagacttggctccgatataaaggaactgggcgtgcgcctgctgaaggtgctgctgctggtcaagcatgtcgacggattccccaccacaccgcataacctgcgtattctgctgaccgaccagttcgacatggacgtgatggaactggaacggaacatcaagtatgttctgggagagttggaaaaagacacctatgtgcagcgtgtgggagatacctacaattacctgaccaatgaagagcaggatattgagcaggagatcaaaagcacggacatcgactccagcaaggaaatcgacgagctgaagaagatcctggtcagtgacgtgctcggcaagatgaccgtggcatacggcgagcagcgtgcccagttccgctatggtttgcgcatcgatggggtgcaacagtccgcgcagcagcccatctggttgaacgtggtcacatcgaccaatgcgcaggaccgtgcggacgccattcgcatgggcatgggcatgcgcgacaccatcactttgctgttggatatgtccgacaggacactgttcgatgatctgcgcatgtacgtgaaaacctacacatacctcatgcgcaccgacaagaacagccagtcagaagtgcgccagcagatcatctcccgcaagagcgtcgccaatgaaaggctttacacggagctgcgtacccgcatcgtcaaagccgcggccaatggcgagttcgactataacggcggaaaagtggaagtgaaatccaccgaggtgcaggcgcgtatggcggaagggcttggaacgctcatcggccggtactacacgaacttttccctacttggtgggcaaagatacgaggaaacggatctcgctcgcatcatcatgaacgcttcgcagcaccagcctggcatgcttgacggcatgaacgcagtgcaggacaaactcgacgttcccgccgatgatgtgttcgccgcggtcagtcgtgacaaaggcaaaggcatggtcgccaccgtcaagagccttcttgatgcctacggcagcgttccctatggttggccgtacgccgccacgctcgcatgcatcggccacttgtatggttccgacagaatcacgctgacgctggatggcaagccggtgcagcgtagtgaggccgcccgtttgcttagggaaacgaagaagcaggattccatccgagtggatctgccacgcgtattcgacacgagaaaagtttcacagctgcgtgacttcgccagggatttccttggactcaccgctgcggacctgccatcgaacgcgattgatctggcggaggccgttaccacgcgacttaagtgggaagcggagagtctgacccagctgcgcgtgcgcaatgcccgattcggctttgtgcagcagctcgacaaggccattgagaaaatcaactatgcctccggaatgggtgaggactggctgcttggcgatttcaccgcacaagaaaccgaaaacggttccgaagaactgctcgagtttaaagaagacgtaatcgacccgattgtcgctttcctcaacggctcccaatccaggattcttgcagacggattggaatggctgaaaaacaacaagccgaacatcgactatgtatctggcactacggcagtaagcctgtaccaatccgcggaacagctggcaaacgacccgaacatcttccgcaaaaccaataaattcaagactgccattgacgatctgcgtgaggcaacagacgcaaccatccaaaccgaacgcgccaacgcactcaacgacgtggaagatattcgcgccagaatccacgattccaccgaatatcagcacgcaacacaaaccgcgcaaaccaaggtcgagacagaactggaccaagtggcggaacgcatgcagcgcataccgttcatctacaaaatgcgcgaaagcgtacacgaactgagcgaacgcacttacccgcaactcatcaatgcactagcagcctccgcaccgagaccgaagaccgcgctcgcagatgaggtgcagactccatctactacaccgacgaatacgaacattcctgaagtatggcaagagaaaaccccgcgcgtggccgtgtcgttcgccaccatcagcagacctcacaccaaggatgctttggagaccaaggatgatgtggatgacttccttgatgcctaccgccgtgagcttatcgccgccattgagaatggaaagaagatcctgctatgaacacgtcgaaactgcaagccttcgcaacggatgcgcgccgccagctcatgaatgcggtgcaggcccggcttgacgccgcattggtgccgaattccgacgcccaggttgacgacccacgtgcattcgattttctgcagcgtgagatcgggcaggccggtggcggtgaagagggccgcagacatgtggtggaacactatgcgtaccggtggttcaaccgcatcattgcgttccgttacatggatgtgcacgggttcaccggcacgccggtggtctctccagctggcctgaccagcacgaatggtctgccggaagtgcttgcagccgcgaaacgaggcgagtatgacagcagggtgttctcgttgcgggtgaatgataaggccaaagagcgcatcgaaggattgctgagtggttccgtcatggcagatgatccgcagggcctggcttatggtctgctgctgcaatccgaatgccggttctggaatcgtaacctgccgttcatgttcgaaaacgtcggcaaggaggccggcagagtggatgaactgctcatgccagccgatttgctcgccgagggttccgtgttgaggaatgcggtggaggtcatggccccggaggattgcggtgttgacgatccgtccggcaacgtggagatcatcggctggctgtaccagtactacatttcggaacgcaagaacgaggtgatggacgggttcaagaagaaccacaaagccggagccaatgagattcccgccgccacccagctgttcacgccggattggatcgtgcgctaccttgtgcagaacaccgtgggcaggctctggatgcagtcacatccagacagccagttgtacaagaactggaactactatattcagccttcagaggatgactccgccgggaacgaggatatcctcgcaatccggactccggaagacctgaccgtatgcgatcccgcatgcggttccggccacatgctcacctacgcgttcgacctgctgtatgagatctacgaggaggaggggtatgcgccgagcgatattcccagcctgattctcaaacacaacctgtacggcatggaaatcgatgaacgagccgcaagccttgccgccttcgctctgaccatgaaggctcgctcccgttcccgtagattcttcaagaggcaggtggaaccgaatattcagcgcattgtgccgattgcgttcaaggaagacgaagtcgccgagctgaatgatctataccaggtgaatctggactccacggtatggaatacctatgcgaaggcggatgtatatggttcgctgattcagccgccgcaggagcttgttgatcttgcctcatcggcagaagacactgaagccgaaaccacattgtttgactcgcttctgcgtgaatgcgcggaggagattttcgcccagacaaggtatcttgcccgcaaatacacggcagtagtggcgaacccgccatacatgggcgcaaagaacatgagcgccgagctcaaacagttcgtgcaggatcgctatgaggatggtaaagccgatctcttcgctgcattcatcatgcgtaaccggcaattcctgcgacataacgcgatgttgggcatgattacgatgcaatcgtggatgttcctgtcttcatttgaggatttgaggcgcaacctgcttgcttcttcagctatagaaacgatgtcgcatcttggtgccggagcattcgacagcatcggcggcgaagtggtctccacgaatgcgtttacgctcaaaaatagccctaatagcgggaagggtatttatattcggctggtggatgtctccggtgacagtaatcaggcggatgcttgtgcggaagcgattaacggtgatgcgaattatcgcttcgaggtgaaccaacacgagttcgcgcagattcccggttcgccaattgtctactggctgtccgaggctgtttttaaaatattcgacagaaaaatcgctaagggcgccggtggtgacgccctgagcgacatcgccgatgtcgctcagggcgtcaccaccggcgataatgcgcgttttttgcgattctggtgggaatgctactgtagaacaattcaatttgaccgaatctctttgcaggaaactccactgcaaaggtgggttccatgtgataaaggcggcgacttccgccgttggtctgggaacaatgaatatattgttgattggactgaaaacgggaagaaactttttgattttccgggctcgactccacgaaatcgtgaaataacattcaaaaatgcattagcatgttcaaaaatcagttctgggcagccttctttccgaagacgcaatcatggatttgcgtatagcgacgctgccgttgctttatcggactcaaccttgttgtctgaattaaactgttttcttaattcgacgacggctttaactattatgcaggcattatctccgacacttaattttgaagttggacagattcgatcgcttccatgcaaatttggtatttcagctaactggcgtgaccgtgagaaagagcttgtatctgcaagtgaaaaggattgggattcttttgagacgtcatgggatttccaacggtttgcgttgcttgaccctgatcagggtgcccaagcaggaaatttgcttgaagatgcagtattacatcttcgggagtattggcaccgcgtgtccgaggaacagcgccagcgtgagatccgtaataacgagatggttgcggatgcgtatggcgtgcgcggtgatgtgccatgcgatgtgccactggaacgcgtgtcattgaaacgcaacgtcgcgttcgcatatccgaaggacactccggaagtacgcgacgagaaattcgcccaagatgtcgtcaaggaactcatttcctatgcggtgggctgtatgttcggcagatattcgcttgataagtctggtttgattctcgcttcgcagggtgaaacacttgacgactactatgcgcagattccagacccgtcattcgaaccggatgcagacaatgtcattccagttacggagacggactgcttcgaagatgatatcgtgacacggttccgcaggttcctcaccgcagcgttcggcaaggagaatctggccgcgaacatcgcctacatcgagcaggtactgggcaagagcgtccgcaagtatttcgtgaacgatttctacaacgaccacgtgaagatgtactcgaatcgtccgatctactggcagtactccagccaaaccaacaacaaaggctcattcaaggcgctcgtgtatctgcatcggtatacgccaaaaactacgaacgtggtactcaactatctgcgtgactatgccaacaaaatcgccgacatcgccgatagcttggaacattcggatcgtgctgcggaccagaagcaggccgccaaactgcgcaaggccgttctcgagtgcaaggattacgaggaccagatcctgtacccattagctacccgcaacctggaaatggatctggacgacggcgtgctggtgaactacctgcgcatgggcaaagcccttcgtgccattccctccatcgagcgaaagcgcaaagaagtctccacctggacctggcccgtccatccgctgaaggaacaagacaaggaagtcagtaatggcaaagaataagctcagcatttacctgataaaacaagatttcccagtaggggagatagtccctcctgcttcagataatgggaatcctattatcgaattgcaaattaaggggcatgagagttgcaagctgttcgttcgtgccacaaaaccgcatgaacctgaatgggctaacgcattttttaattcagcagtagaaagcgaatcccttaaagttgccaatattggagcggctcttgtcattccagttctcattgagaataattcgtttgatgcaaaagcagatgaaattttttcgtctgttggtgaagaaaatcggcgttactttgttcttacttttggatatggtcgtacgcttatcaatcgttcggcaatagaggaacgttttggtctgaaatgtgtacttaattctgtaaaaaatgatacattgagagcgattcatttcgctgatgtctcgggtagtgccaagcgttcaagtgaacagttgtcacgaataggagatatcgatgattttgccatcgatactgaaaggaatttgttaagccaggtaacggctaaatgcggagaagatgagttgctgtgtggaacggtgactggcggtgattcgcttgctgttacaaaagaaattgatatagataatgtacaagaattccttaaatctctctatgaattgttctgtcaagaaacttacaagcaagattttgattgggttgacaatatcgctcctgtaaaagatcccgctctagaacaaaaattatgggacgaatctattcggcaaatcgcaaactatagctataacgatgacagtcagcatgatttgtggatggcggttcctgatattattgattgggatagagttgaaggtttccaaattgggtctcaaaccgatgagaatgatgagcctatccttcaggatgatgtacttttagcagatgtacttcgttcttttaaaaagcctcttacttctattgaccaacttaaaaataaacgagtaactgctatctcaaaagaaaatggcttgccttatcaaggttggcaagcgcataagtgtcttgttggtgatttggcatacggtggggaatcatattgtgtgcttgatggcgcttggtatgagattcgctcggattaccttaatcgaattaatgaagattttatggatacggacgaatcggatatagatttcattccatatcctcaaaatgatggagaacaatttgttgatgattttgacgggaaaaagataaaacttgagaaggaagggctatataactataagcttgagaaggctcttgctcaaaaattccctaatcattttctcttaatggataaaagattaatttcgtatggtggtggtcgtagccgaattgaattttgtgatgtgcttgctgatgatgggaaaagaattcatataaagcgatattcgggttcggcaacaatgagccatttgtttaatcaggggcttgtttcggcttctatggagcgggatgctgccgattatgcggaaaaagtgaatgaaaaaatcaagcaggttggcaaacaagaggggctgtcttcagttgagaattttctgttgaatcagaatcaaattcatgatgtcgttttcgccattgttcccaagcaagatagtcatagtcatgatcttccctttttcagcaaggttgcgttatgctctgttaaaaaacagctgaagcgtatggggatagagacaaaactgaattggattaaccgtataaatgagccagaagggcaaacgcctaatgagcattgagaccttgttgaatggcgaatccaagaatgtggagtacaagctcactcctccctctaggagcatcaactacaccaaaaccgcggtggcgttcgccaatggacagggtggttgcttggtgttcggtgtcgaagaccaaacgcttcgcgtggttggtattgccgaagacaaggtgttcacggtaatggattccatttcggacgccattgtcaatagctgcgagccactgattattcccgacatcaccatgcatgatgtgaacggcaagacggttatcgtggctgagatcgctcccggcttgcagcgtccgtaccatatcaagtcgctcggccaggagcaaggaacattcgttcgcgtagctggcaccacgcgtcaagccgatcagcccactatccgggagctgaccattgaaggcagcaaccggagtttcgaccaagtacagtgccttggattatccgtagcggaagaagacatcgaagcattgtgcgcaagtctgacgaaaaccgcgaagaacaacgccgaagaccccgcaaaaatcaaaacggttacggagaaacagttgctgcaatggggcgtgctggcagaacaggacgggcaattggtgcccaccaacgcttatgcgattctgtctggcaatgaggcagtccgatccgtggtgcaatgcggcgtgtttaagggaaccaccaaagccgtatttgtggatcggcgtgagttcgccggcactccgcaggagcttatcgaagagtcctaccagtatgtgctgcgtaacatccatatgggcgcccggttcaaaggcgtgtaccggcaggacgtgtatgaaattccgccggatgccatacgagagctgatcgtcaacgcgatagtacatcgcagctatatcgaccattcgagcattcagatcgcgatttacgatgatcgattggagatcacttcgcccgggcgcttgccaatggggcagaccattgaacgcatgaagcagggctattcgaaaatccgcaacgaggcattggcctctgcctttgagtacatgggttacattgagcattgggggagcggcatcctgcgtgtgatgcaggagatgcgcgatgccggattgccggaaccggaattccttggcggcgatacggatctgcgtatcaatatctatcgcaatggctcggagacagtttctgatgacgggattgtgacgggattacgacgggattcgctttctgatgacgggattgtgacgggattacgacgggattcgctttctgatgacgggattgcggaagaaacaacttccaaaacgaatgctgctccgaatgccgccattgcagtggttccatcccagaaagagcgtattcttgatgcgctgcgtaagaatgcgagcatttctatctctgacgccatacggatactgggcgtgcaggaaaggcaggctcaacgaatattgaagagtctggtagaggaaggcagtgcagtgaaaatcggtgccgcccgtgccactcgatacgctgaagcgaagaaaaggacggaactgcatgagtgagaatagccaagtaacaagactgctcgccagacgtttcagccagccaggtgaacgcgggcgcatcgtattctggcgcgacgataagaagcagtacgtggatgatgcggcaacattggtaggcgagtgcgccaccgatgagatactgcgtgaggttgaactcatcactccggaaatcggggatgagaatgacaagcggtacattccgttcacggtgcgctaccgcatgttccacgagcagccaaatcaaaaattcctcgtatatctgacggagccggccccggcagttcaggacaactggctgttggatttggagctggcatatggccccacgttcaccatggacaaacttgccgtgatacttacggaaacgctgccggaagcttccgccgacacccgaaacaagtggttggaagtgatgaagcgtgtaccgaagttcttcgacagtgaagaacgtgccaagcgcttcgcgaaacgtcttaacgcgcacgacgacgccaccgatttccaagcgaagatgatcgccacgttgttgcaactgaaagacgatcggcacagcatgcaagacatctgggctgagctgcttacgcaatattcgcagggtgacgaatccggcattgaagaaatcgaaaaaatgggattgagccaattccactggaatggcacgcgaagaatctaccatttcgatgtgaatactggtactggagccaaaccaacggtgaaagacttcgtgctatggctgttccagctggcatggaacggattctccgatggcaggaacgctgtctccacttatgcgaacattattcgcgactgggacgactggtataagaacatcgacatgcgcacggtactgcagaatctttccgagaacgccgtggaagaattgcaactgtccactcgaatcgccgacatgagtgtggaggagcttgccgaccgggacctgttccgcgacgtggacgagatgatcgtcaacaagctgttcgaacggttgggttcgcagtccattacggacgaccaagtgcaacggatcatcaatgggcgcaagcagaagctttggtacgcagaatatgccgaccaatacgagtgcattgccgcagcaagcaggctccgtgccgttctggctgaatgcggtgaactcatcagcaccatcagctcaccggaacaagggatgaagctgtatgccgaaaagctgtacaaggccgacggcgcatacagaaaatatgtgctcgcatggcatcgcgccaacccggatgcggtgagcgtggacgatgatctgcaaagcgcctacgaggcatatcagcaggatctgggtcaggcatggcaaaaacaagtcgatacgcttagccaatggaagttcatagacatggacgcgcaaaccaatttctatgaacgtgaaatcgcgccggtattgaagtccggcagaaaaatcgccgtgatcatttccgatgcgctacgttacgaggttgcgcaggaactgtccgaacgcatcgacagggaaagccgtttcagtacgaaactgaacatgcaatacagcgttctgccatcctatacgcaacttggcatggcggcgttgctgccgcacggctcgctcgaattcgacagcaaagaccgtttgtatgttctggctgatggacgcagcaccaaaggaatcgaagcgcgcaccgccattctttcggccgtaggcggcaaagcgattagatatgacgatttgacaaagctgaaagtcagcgaaatcaaagaactatataaatcctgcaacgtgctgtacgtgtatcacaaccatatcgacgccaccggtgatacggagaaaacggaatcggaaacagtggacgcatgcgagaaaacgttcaaggaactgggcgaagtagtcaaaaaacttgccagcggcaacgtccataacatgatcatcaccgcagatcacggattcctctatcaggaccgagatctggacagtacggaatggttgagcgaacagcccaagggcgatgcagtatgggtgagaaagcggcgattctccatcggatccaatctcgctccgggccgcgcgttcgtgacattcaacgccacacagataggaatggacgatcctcggaatgaaggcataagcatccaagtgccgaactccatcatgcgcttgcgcatgcagggcgccggtgtgaagtatgtgcatggaggagcagcattgcaggaaatcgtcgttcctgtgctgcatgtcagtaaggggcgttccgcggccgacgatgtgagggctgtggaattcactattctgcaacgaaccgacaggctttccagcagacagttgactgtggaattcttccagaacgagcccgttggaggaaaaatccgcgcacgtaccgtattggccggattgtggggacgtgatgcggcagacaatgatgtgctcatctccaatgagacgccggtcgccttcgatctgatcgggcaggagaaaagcgaacgccatgtgacggctacgctcatgctgaccagtgacgcggaacggttcaatggaacgaatatcgaactgcgcctgcgtgagaagacagatgggtcaaacgtgctggtcatgcttgagcagaaagcacgatacttcttcaaacagggcgtggtggccgacgatgccggattcttcgactgaattggatgagcacagaggaaagcgaccgtaaggggtaacacaatgaatgagcagaatatgagccagaacggttggattgaaagtcctgaacacaacacggatgggaattccctgaccgcgttggacgctaagatcgctgatctgttccccggggtcaccgtccgcaaggatctggtgaacaaggtcaagggcaatgcgttggtgccctcgtatgtgctcgagttcctgctcagcgcatatgccacgaacaccgaccaggccagtatcgagtcgggtgtggatcgagtgcgtgccattcttacaaacaactatgtgcatcgcgaggaagccaatcttatccagtcgaaaatccgcgagaaagggagccataggattatcgaccgtgtacaggtggctcttaacgagaagaccgacctgtacgaggcgacattctccaatctcggcatcagccaggtcattgtcgatcccagccttgtaaaagcttatccgaaactgctggtgacgggcatctggtgtatgtgccagatcggttacgcatattccggcgacccgcgcgaagtaccatggcagttgctgcagctcaagcccgtgcagatgtcgcgcgatgaccgtgcaaactacatgcagcaacgttcgcaattcaccgatagcgaatggatcgatctgctgatgcaatccattgggttcaatcccgatctattctccgaccgggcgaaactgctgcatctggtacgcatggtgccgtttgtggaacgaaactacaatctggtcgaactcgggccgaaaggcaccggcaaatcgcacatctactcggaattctcaccgcacggcatgctcatatccggcggggaagtgacagtggccaaactgttcgtgaacaattccaacggacacttggggcttgtgggctattgggatacggtggcgttcgacgagttcgcaggcaaggccaagaaggccggccgggacttggtggacatcatgaagaactacatggccaacaagtcgttctcccgtggcgtcgagacgttccaaggcgaggcgagcatggcgttcgtcggcaacacctcgcataacgtgccgtacatgctgaaaaactctgacctgttcgaagagctgccgaagcaataccatgatccggcgttcctggaccgcatccacttctacctgccgggttgggagttcgaacagatccgttctgagatgttcaccagcggattcggattcgtggtcgactatctggcggagattctgcacaacctgcgcgatgccgattacagcgaccggttcgaaaagtatttcgaactgtcttccacactgtccacgcgagataaggacggcatcaaaaagacgttctccggattgatgaaactcatctacccggacagcaaggccactcccgaacagatggaaccgttgctgcgttgcgccatcgagggccgcaagcgcgtcaaggaccagctgtgccgcatcgactccaccatggaggaggtcgagtttacctacaagcgtgtgagcgacggcgaaatagtcgccgtgcagaccttggaagagctcgactacccgcagctgtattggcgtggtcgtgtagctgagaattcggaagataagggcgaggcggaagcgcctgttgccgatgatgccgtggcaattgcgggtagcgagggcgaagccggtgcctctgagaatgccgatgccttgcccgtagcgcggcatcaagaagcggtgatgttgacgccggtcgagcgtcttgcagcaaaggccgatgggaagcagcgggaactggtcgagaatcaacgtggaatcacgtatttcggattattcggcccctacttggccggggcaaagaaaatcgttgtagaggatgcgtatgtgcgtaagccgtaccagctgcgtaatctggctgagttcttggagatgctgctgagatgcaaaaatcccgatgaggatgtagccgttcatctggtgaccgggcataatgagcctggattcatggaagcgcagctagatggtttgaacgaactggcatcgacgttctcacagctgggcgtgaaccttacctacgaattcagagacactttgcacgaccgttccattacttcggataccggatgggagattcttcccggccgcgggcttgacatcttccaaaaattcgttgacggcgattggcttaacccgttgctgcgccatcagcagctccgccgcgtcaaggaatgcaaggtcacgtatcagcgggtcagcgagaagtgaggtaaaaatgaatgtccaatgtccagcttgcggaacgtatgtggcagagaccgcgaccatgtgtccgtattgcggttttcgcggtgatgatccgagccggccaatatacaagcagggggagtatcgtcctgtgccaattgtgccttgcgaaatcgtgatggatgatggccagcgtggcgagatttggttgtctgacgaagacagcaagaatctgtttcggcatttgactaattggaaatggctctcaaccatgcttccggctctggtggaaacattagaaagtatgtttggcggaactgtgcatttggaagccaagcttccggaacatatcatgcgcatgattgaagaggacaaactccatttcgccacggataaaaacggtgagattctcgctgaagtgttcgatgaacgcaataaaatcttcaaacaagtgcgtttggagaaagtcgtcagaaatgatacgttattgccggctatgcagcatcttgaaacacaggctgccctttgcttggtaatggaaaaaatcgatgaagtcggccgagctgtgcaacagcttggtgaggaaatgcagcaggatcgtttggcccgtgtcgatgccgcgtttgatatgttccagcaagcgtgtcgtatcgagagcagtcgggaacgtaatgagtatgtacgtgaagcgttgaacgaggccacgcgcgcgaaggctttgctggtgcgtaattttgcgcagcagcagcggctggtgaagcagagtagcaagaaatcggatgccgcattaagggcaatgcaggattatgtggcgattgtgaatgcagtgaacgtgcagatgcaaacgcatatggcgttggggcaacaggacgtggccgcgtattgtcttcaggatcttaataagttcattaagaactatgatctcgataagcacgatacgatgctcaaccttgtaggcagcgtgaagagcaagaacaggggcagtaatcaggaaaagtttattgatggttctttgcaggttgcagcgaacattgaaagcgtggtgaaggctctcgacgcgggcgaagtaatctctccgaaactcattaccgagaatgatgggaacgggaatgattctaacgatgaggagaagcagcatgatgaagaaaactgaggatgctgaaaaagttgctgatgaaattgcaggtgttgacgaagaaaatcctgcgtcgaaaaaacgctcttgtatcaagtgcaagatagaactggcttccgacaacaagctgccgttctgtcctgcttgctgggaagaaattaccggctacctgaaaaaggccggaatcgccatgggaacgttgatggtcgctttgataagaaagtatggtcccaaagtcggcaaggcggtcttcatggcgatcaaggcaacattaaagaagtaatcatctacgctttaattgagatgccatagagacgcattgcttgcggtgtcacgtggctgttgttctcatttcatgggaaatgagggtgaaaaatcaatgtttcgagaggtggcaccatggacgctggcaagaaaatcctgctggacttatttaccggttcgcttcggttcgtggttccggtgtatcagcgcagatactcatggggcgaggcgcagtgccggcaattgtgggccgacattgtaacggctggcaggcatcctgacagaacccatttcatcggatcgatcgtatggatgcaggaaggcggcatcggcccggatggtgtcagccggtgtctgctcatcgatggccagcagcgcctcacctcggtgaccctgctgcttatcgcactggccgaatatgcccgagaacaccctgagagcctgcgattctccgcagacatgctcatcgaccgtggctatcttgtcgacaagtatgcgactggtgaaggccgctacaagctgacgctttccgacgacgaccgggacgcgttgcaacgtctgtgcgaccatgcggtcgaccccaactgaatatttgattcgttgtggtccgttgttattgcggttgggggccattacgggttttggcggttattgcgtttcagggccatggttattgcgctttgaggacatggctggttaggctcctttcaccatgcgagggacgtgtggtgaaaggagctgccggcaatggtacggaaaatacaggcgaaactggtcctgcgtttgcatggccaggggttatcgggacgcgcgatcgcaaggtcccaaggcatgtcgcgccggagcgtggccgatgtgctgtacgcggcgaaggccgccggcatcggctgggatgacgtcgccaacaggccggacgacgaggtatacgcgctgctgttccccgggcgcggggaacgtgggagcgtgtaggagcaacccgactggggcaaggtccaccgggtgatatgaactgatttttgttccgtatttcctctgactcgatgggagatgatggaaccatggcaaagggcgctcgatatacgccggagttcaaggcgaaggcggtcaggctgctggcggaatcgcgttcctcgtattcgtcggagacgaacgcgatctccgcggtggcgaaggatccggggatagcgccggaatcactgcggcgttggcgcaaccagtcggacgcgacggtcgcggaggagacgaggcagtcggccgaggacgcgatggcggagctgaggaggctgcgggccgagaacgcggaattgcgtcgggcgaacgagattttgacgacggcgtcggcttttttcgcggccgggctcgacccgacacggcgttgatggccgcgtacatcgacgagcatgaaagccgtttcaaggtcgggccgatctgcggggtcctttccgaatcgttggactgcgggtttctcacgccgcgcggctaccgcatgttcagaacgcgtcccgtcagccgcatgcgggcggggcatggggcgctggcccgcgacatcctccagatccactcggatttcttcatggccgtgtacggttacgggaagatgcacgcgcagctggtcgcccagggctgggatccggccgaggccggccgcgaccaggtgatgaacatcatgcgcgagcttggcatccggggcgtgcgccgcggcagaaccccggtgacgacgaaacccgccaagggcacgggcggcaggccggatccggtggacaggaggttcgaggcttgtacgccgaaccgcctgcacgtggccgacatcacctacgtgcgcatggccaacggctcgttcggctacacggtgttcgtcaccgacgtgtacgcccgtcggatcgtgggatgggcgtgcgccatgaccatgaacacgcaggagctgccgttgcaggcgttggagcaggcggtctcatgggccgcgtcccgcggcggcgcggatggtcttatccaccacagcgaccatggcacgcagtgcatcggcacggtgtacgccaccggggttatggaatatgggatgctgccgtcgaccggcaccgtcggcgactcgtacgacaacgccatggccgaaagcgccgacggcgcgtacaggaccgagctggtatggcggcgcagacccttcgcggatctgaaggacctggaattggcgacgttccggtgggtctcgtggtggaactcgaagcgcctgcaccagtccctgggctacaggacacccgaagcggtggaaaccgagtattatcaacatcaagcggcacaagccgcctcactataagggcggaacaaaaatcaggccacttcatagcattatcgcaattactgggtgatattgggatgatgggtaattttaatgtcggggcgagggctgtagataagggggctgcggacgttttttggaggtgatcacgcagccgttccttggctttgacggtattgtaccggactcatccagccgagcgaccgtttgatgcgctcgtggtcgtgccagcggatgcagtcgtcgatcggtcagcggctctgcggttccattgcgcatgacggtgtcgcagcggggcagcatttcggagacggcgtccttgacgaccatgatgcggctgacgttcccggacgttccggcgccggcgccgctggtctcactgatatcgctgccacctgtgtgctcgcggtccgcgtggtgatggctcttcgcgacgatgacggtcgcccggcgtcgtcgcggatcgaaaggcgtgcctccctcgacctgtacgtcgccggtatcgtttgccgagtcgccttcgactgcgacgatggcgtcatcccacggattgctcgtcgtgtggggaatcagtgtggtcagccatgccgcatgcagcacgtaggacgagttcaacccgctcatgctctgcgcccggtcgagcttgatgacgccgctggtaagtgtgccggtcttgtcgacgcacagcacgtccatgccgcccagcgtctcgatggcgtcgagccgcctggcgatggccttgccggaggccatcgcccgcgcaccccgggacaggcagacggtgacgatcagtggcagcatccttgcgcacgggcatgctttcgccagtgagcgccccccctgtgcgatgcgcaggtctcggccctccagcagcttgcagtcggccgggacgatgtctccgacgaacaacgtcacgatgtcgcccacgacaagctcttcggacggaatctgccgctcgccggcaccgacccgccgcaccgtcgccgtgatactcaccatggtggccagcgccgtcgcagcatgcgagcttcgggagtcgtgcacgtatcagatcagaccggacaccaccaccatgagcaggatgatgcctgcggtcaccggcgcgccggtatggtgttgccgccgtaagcccgacgcgctcggcgaacctcgtcgggttccaagccggattcgtgcgcatacaccaaggcgagcgtggcctctggcgtggcatgggcggcgaaattcagtcgctgggtgatgctggcgtggcgctcgccgcgccagcgtatcagtcgtagcgtgttcatgattcctccttggcgattcggggcggtccgttccgctgtcgggttgatcgttgtttccattgcggcagttggctgagacggatcaactcagtccgtttcgctggcttcctcggccggtcgggtggcgtttgccgggttggcggcgtcgacggtgatgatgtcatcatcggcgtcgtagtcgaacagttctccgtatcgaccccacgtcatggcgatgttgaactggcgctccgcctccgcgtccgtatgacgggccctcaacaggtcgacgatgagctcgccgcgcaggcggccgtgttcgctgtgacggaccgctcggtcgatgatgcgcaccagcggtgccttgtcttgcagcatggcggcgaacatcgtcttgcttgtcagaatgtccgcctgcctccactggcgtccgagctcggtcaatgtcacgtgtccgttctcgacggtcagcaatcccagcatggttccggcgtcgatcagcgggaacaggtcgtccacctcgaatgacagctcggcggccagatcggccagatcgatgccctgcgcgtgatcgtatacgatctccaccagtccggccaggcctcccggcgtagcgttgggcagcatgtcggaggatgcctgatggtcggcgttgctcgtccgggccggggcctgatccgctaccgtggtctggttcgccgcgccatctgacgtgccatgcacgacgccgtccccggcggccgtgcgctcgtcggcggtatccgccgtcccgccatcgcgactctgcccggtcaggatcgcatacagggtgtcgaccatagcctcgaactgggcggaatgacggtcgcggggcctcggcagggtgacgggcacgtcggcgatgagataaccgggatgcgagccgagcaccacgacacgatccgccatctgcacggcctcctcgatgttgtgcgtcacgatgagcaccgacttgatggaacgctgatcgccgctccacatcttgagcacctcgttgcgcaggttctcggccgtcagcacatccaatgcggagaacggctcgtccatgaacagcgcatcgggctgcaccaccagggcccgtgcgatgcccacgcgctggcgcatgccgccggagagctccttcgggtacgcgttctcgaatccgtccagtccgatggcgtcgatggcctgcagtgcagcgcgacggcgttcctcgcgcggcacgccgcgggcctccagccccagttccacattcgcttgcaccgtgagccacggcatcagcgcgaaggtctggaacacgagtcccactccgggattagggccggtgatgtcggtgccgcggtaggtgacggtaccgctcgacgcgggtaccaggcccgccaggatgcgcaggaacgtggattttccagcgccggaccggcccaggatcgccacgatctcgccctcatgcagggtgaaggagatgtcgcgcagcacggtcagctccttaccgcgcttggcacggtaggccttgcccacgtgctgcgcctcgatgatcgcggtgccggcggcgttcgtcgcggcggtctgcgggaaggttgcggtgcggtcggaaaaagttgcgatggtcatgataaatggtccttgctgttacgttttttgcggatgatcgcggcggattcgaatgacatgcgctcgccgccgatgctgttggattgttgcgggtcgatgggccgggacggccggtgcggcctccgtcaggcgacggagaaacggcgctcggcgtacgcctgcaatggacgccagaacagctggttgacgcccacgacgaacacactcatcacggcaaccccgatgatggtcttgccggtgtctcccaccgcggtcgcattggcgatatatgttcccaatccatttgccgtaagcgtggtgtgcccgtaggccacgatctcggagacgatggaggcgttccacgcgccgcccgccgcggtgatgccgccagtgcaccacgagccgaacaccgccggcaggatcagcttggtccaccgctgccgcgtgtccagatggaatgcccgcgtggcctcgcgcaggtcatcgggaatggccgaagcgcccgcaatcacgttgaacaggatgtaccactgcgttcccagcgacatgagcagaatgctgccccagctgatgtcgatatgccaggcgatgaaccacagtgtgacgaacgggaacgtgaagttcgaggggaagctcgccaacacctgcgccagcggctgcacgaaccgggaaatccgcggattcatgccgatcttcacgccggtcggcacccagatgatggagcacaccacggtcagcagcgtcacgcgcatgaacgtgatcagtcccaggaccatcgcgtggccgacctcggcgaacccctcgccgtccgagatgaaacgcaccagcatccacagaccggccaggcaggccacagccatgagcgccataaacgcgatgtcgagtgtgcgacgccgggtgccggcggccggccagcgtgcgccggtacggcccagcgggcgggtcagccagaacatcagatcggcgatgggccggcccacgagagccagcgcatccgaaatgccggaacgccgcagaatcgacagcaccagactcgtcttggcctgcacggactcgttctgcgtgatgcggaacttctcggcccacgccgtcagcggcttccacagcagcacgtcgatgagcagcaccacgatgaccatggtcacgatggcccacagcaccttgcccagctgttcgtgctcggacgccaccgccacgaagctgccgaggccgggcagtgcgtacgtcctgttgttcacggagatcatctccgaggccgtcaggaagaaccagccgccgccgacgctcatcatgcagttccatagcagcggaatcatcgaattcggcacgtcgagcttccagaaacgctgccagcgcgtgagctgcatggaacgagccgcctcatccagctcctgcggttcgctgagcagcgaatggtagaaggagaaggtcatgttccatgcctggctggtgaagatcgcgaagatcgacgccgcctccacgccgagaatggagccggggaacaacaccatccaaatggtgaccgtggcggacaggaagccgaggatcggcaccgactgcaggatgtcgagcagcggtatcagcaccatgcgcagtcgccggcatcgggccgccgccaaaccatagatgaagctgaacaccagtgacaaaaacagcgcgatgaacatgcggaacatcgaacgcagcgcgtaatacggcagcagatgcaaatcgtcgctcaccgtgctcggcacgcctgacgggccgatcggttcgttgatttgcggcagcagccaggcgacgacgccgaacagggcgagcacgcccgcggccaccaccacgtctgcggcgatgcggcgcgcggcgctgctgcgggacatgtcggcggcgtcgacgtcggaacgcagacgaatgccggggaacgaggagtaattgaagaagttggacataacggaacctgtgcgctctcatgtcgttatctcgaaggagataaacggttcccgttcggtgggcgttcgactcggtatccatgcggcaagtgcgcgccatggacgtcagcggtcgcgtgcaggcgcgccgatatgcgggtatgtctgcatgcagatagccgatcggcgtcgtcatatgatgatgccgatatgccgggagtccggagaacgggatgtggattcgcgattcagacgttcggtgcgtacgtcatgcgggatgtcgcagccgtcgtgaggcggtgaagtcgatgcgagccgaattagtcagtgatcggatcgccctcgccggatacggcggtatcgtgacggacggccaatgccatggtcgcggtacaaacgtgtgaagagaatgggccgtatgctgcgcccgatggcatgtgatattgtccgccatcgcgcagccggctactatgacctaaatcgccgtccatgacattcacctcctcaatggaaccagtacgccgtcggacattgacgacatgaggaagtgcgacttctcgaagagttgcccctagtcgtgtcatcgttcaagcttcaacatcgcagggcggtggaattgcgttagttcatgccttgatccgacaagaactgctgacctgcgtgcagtgtctccactgttagcggcagcaacccatatccctgcggtagcctcgcctaccgacgctcccaagataaagcccgcctgcaggtctgtcaactacgtcgcagtgccttggtgttggaatgccatccgacagccattctgtccgcaataatccgtacaattgacgattgctgtgtcgagaagtgggccgccgcataagcccacgtctccatgggtccagtccgaacggccgcaaggcctgactttcggcggatcggcaggcttcccaagggcaaacccgagggataacgagaacaggccaacgcacgtgatgcgcaatcgcgtggatggccccagatctgtggctgatatgcggcagcactgaaggaaaacaatggttaacgctgttgaggcttttgacgccaagcacatgaagccggctgaggaaatcccggccttccgtcccggcgacaccgtcgacgtgaacgtgaagatccaggaaggcaacaactcccgtatccagaccttcaccggcgtggtgatcgctcgtaagggcgctggcgtgcgtgagaccttcgtggtccgcaagatcagcttcggcactggtgtggagcgtcgcttcccggtgcactccccgtccatcgactccatcaagctcgtgcgtaagggccgtgtgcgccgcgccaagctgtactacctgcgcgctctgcgcggtaaggccgctcgtattgccgagcgccgcgacaactccgctaagtgagtcgattcgcgggtgcaatcgtgagcctgatgatgcaggtgcgcgaataaaccgtgaaattcagcccggaaccgtttcggtttcgggctgttttcgtattttccacgtatgatggacgggcgccggcacccctcatatccggcagcatgaatcgcgaggagatggtatgcaggacgatcaggataacggcgaattcccgatttccgacaatccggagagcaatcagacctcgtatgatgacgaggccgatgcccgcgattcccgtacgttccaagtcgccgaccacggcatcgccccgtccccggttcccccggcaccggcgcgcccggcgtacgccgcttcttccgctggtgcgaatgccgcggcagcatcatcgatggatgatgaccacttcaccctacgcgactttttcctgtggtgcggcgttcccgtgcttatcgtgctgctgattcgcattttcgccgtcggcttttacgagattccttcgcgctcgatgatggacaccatggtgcccggcgatcgcgtggtgaccagcaagctcacccccaagatcttcgatctgcagcgcggcgacgtcgtggtattcaaagatcccaacaactggttgaacgaggagcagagcagtgctcccggtggcgggtacctcatcaagcgactgatcggcctgcccggtgacgtggtcgaatgcaagggcgcgggccagccggtgaccatcaacggcgtggccatcaatgagacctcctacattcgccccggcgtggacccgagcgccttcccgttctcggtaaccgtgaccgagggccgcgtgttcgtcatgggcgacaatcgcgccaattccgccgactcccgctatcatcaggatgacggcgatcgcggcttggttcccatctccgatgtggtcggagtcggaatcgcgaaatactggccgcttgaccggcttggtgcgattgatgaccaccacgaagtcttcaaggacgtgcctgacgcttccggctcgaattcctgagtctttttttgaaccgtgtgagtctttgaactgattgagttccgggccgtctgaaccctgaaccatatgaatcctgaaccgtctgaatcctaaccattgtgagacgatgggagccgcgcatgattaccccgacacttgacttggaacgcagccttgcggcccagggctatgaccttattactggattcgatgaagtcggccgcggcgcgctcgccggcccggtgatggtcgggtgcgccgccatttgggcccttgatttggagccgttggatggcgatgatgccgtcgaactgtccgggcaggcctacctcggcgtgccggacggcgtggccgactccaaaatgctcaccgaacataggcgcgaggcgattttcgacgaactgcgcgactggtgcgcggcctacgccgtaggccaggccagcaacaccgagatcgacgaatggggcatcacctacgcgcttggcgtggccgccctgcgcgcgctcagccaagtcgaacgcgaacttggcttacggcttggaggggaatcgacgataaaaaaggcttcgggggagtctgcgggggagattgtggaaggtcgtccgggaggctccgtaggggaatccattggaaattgcgggggaagcgttcgcgctctgcccaaagtcgccggaattctcgacgggccgagcgattacatcaccaaggcgctcaacacgttcgacgcgccggacgtgccgattccagccgacataacgaccaaagtcaaaggcgaccagcattgcgccaccgtcgccaccgcggcggtcatcgccaaagtgacccgagaccggctgatggtcgacctcgcgcaaagcaacccacgttacgccgcctacgaatgggctcataacaagggctatggttccgccgcacaccgtaccgccatcgccgagcacgggccgactccgctccatcgtgtctcatggcacctgacctgagccgcgtgcgacacgacagtgtgagcgctaacgcaaaactgttgtggacgcgctaaagtcagtattgattaaggtacaagactggccgtgcatggatgccggccgccagcggggaggttaggcaatatggtgaccagccgcaagccaagcaaacgtccgtccatgttcgaagtggccaagctcgccggagtcagccaccaaaccgtctcccgtgtgatcaatgactcgccggacgtttccgacgccacccgtgcgcgagtccaggccgccattgaccaactcggctaccgcccctccaactccgcgcgcgcactggcttcccgccgttcgcgcaccatagggctgatcgccggaggcctcaaattcttcggcccgatttcctccatctcctccatcgaatccatggcccgcgagcacggtctgttcatgagcgtgatgatggtccacgaggccttgtgcgcgcaggccgacttcgacaacctgtgcgacaccttcaacgagcagaacgtcgacgccttcatcttcctgaccccgaccgacgtgatgttcgccgccgcctgccgtgcgcgagtcactcagccgcgcgtcatcgtcaccgccacccacggccaaatgaccgtgcgtgagggattgggccttatctccaccgaaaacaagcgtcgcactgcgctggtcggtatcgaccagtggggtgcaatggccaaagtggtggccttgctgggcgaatacgggcacaaatcggctctgtattttgccggtcccaacgaatggcgcgacgcccacacccgactggatgcgtggcgcaagctcgccgcctcccgatccatcgattcacagatcgtgcgctgccatacgtgggatgcctctgaggcgtatgcgcacatgaatcatctcattgatgagtatgggcgtcgaggcgcggcgttgcccaccgcggtcgtcgccgcgaacgacaatcaggccgttggcatcatgcgcgcgttgcatgagcatgggcttcggattccgcaagacatcagcgtggtcggattcgacgacatgtctggcgtggataacatgtacccaccgctgaccaccgtgcatcccgatttcgaggggctcggcgtggccgccatgcgcgagacgctgcgcttgctgggggagggcggcgagccgaccttcctgaccacccagcacggcatggggctgattcccgccgaggtgcgtgcccggcggtccttggggccggctcctcggcggtaaattggccctgttatcaaaccgttatgatgcgtgacacggcataagttgtgtcgaatgcaggttgtcggtacaatgttttttggaaattgtgagcgctaacaccctccccaaggaaggggataacaacgccggcgctccaaggcaaaggaaagatatggcagcaaccgacaacgcggccgagcaggtcgcccacatcgccgagaagattcgcgctggcaagaccacgctgggtatcgaattcggctccacccgcatcaaggccgtcctcatcgacgacaacttccagaccatcgcctccggcgactacagctgggcttcccatctggaagatggtctgtggagctacaccaccgaggagatctggggcggtttgcagtccgcttacgcctccatggccaacgacgtcgagaccgcctatggcgagaaactcacgcacgtcggccacatcggcttctccgccatgatgcacggttacctcgcattcgacgaggccggcgaactgctggtgccgttccgcacctggcagaacaccaacacctccgaggctcacaagaagctctccgagctgttccagtacaacatccccgagcgttggtccatcgctcacctgtaccaggccgtgctcaacaaggaagagcacgtctccaaggtggcttacttcaccacactcgccggttacgtgcactggaagctcaccggtaagaaggtcctcggcgtgggcgatgcctccggcatgttcccgattgacccgaccactcacacttacgaaaccgcattcattgagaagttcgacgctctacctgaggtcgcagcccagccgtggaagctggagaacctgcttcctgagccgcttgtggccggcactccggctggcgagctgaccgaggaaggcgccaagctgctcgatccgtccggcgccctgaagcccggcatcgtgctcgccccgcctgagggcgacgccggtactggcatggtagccaccaactccgtgcgcgtacgcactggtaacgtctccgccggcacctccatcttcgccatggtggttctggagcacaagctcaaggccctccaccctgaggttgacttggtcaccaccccggccggcgatctggccggtatgagccacgccaacaacttcacctccgacctcaacgcttgggtcggcctgttcggccagttcgccaaggctatcggccagccggttgacgcaggtatgctgtacggcaccctgttccgcgcggccatcgccgacgacgtggacgccaactgcggcggcctgctgaactacccgttccgttccggcgaattcctggccggtctgcctgaaggtcgcccgctgttcgcccgcagccccgaagccaacatgaccctcggcaacttcatgcgcgcccagctgttctccgcgttctccccggtcaagatcggcatggacgtgatgaccaagcaggagcgcgtgcaggtcgactctctcgtgggccacggcggcatcttcgccactccgaaggtggctcagaagattctcgctgctgccttcaacaccccgatcaaggtcatgtccaccgccgccgaaggtggcgcctggggcatggccgtgctcgccaactacctgtggaacaccaacgaggatcacagcaacctcgctgacttccttgacggttgcgtgttcaaggacgcccagtccaccactgagaagccggtggcttccgatgtggttggtttcgaggacttcttcgcccgcttcaccaagggcctgcccatcgagcacgccgccatcgaaaccatcaacctcgaagataagtaagcctttctgacctccctctattgagggaggtccttgagattttgaaaaaacgtccatccatcacagtggaaaggaaaaccaataatggcaactttggctgattacggccccgaggttcgcgccgaggtcaagcaggttcgtgaggtcgtctccaacctgcaccagcagctgatcaagtggaacctggtcgtgtggaccgcgggcaacgtttcccagcgtctgcacaccgccgacctgttcgtcatcaagccctccggcctgcgctacgagtacctgaccccgtcctccatggtcgtgtgcgaccttgacggcaacgtggtcgacggcaccgaagccccgtcctcggacaccgcttcccacgcctacatctaccgcaacatgcccgacgtctacggtgtcgtgcacacccactccacctacgccaccgcttgggctgccactggtcagaacatcccgtgcggcctgacgatgatgggtgacgagttcggcggcccggtgccggtcggcccgttccgtctgatcggctccgaggcgatcggcaagggtgtcgtcgagaccctcaagaagtacccgaagtccccggccgtcctcatgcagaaccatggccccttcaccatcggcaaggatgctgaaggcgccgtcaaggccgctgccatgaccgaggaagtcgctcacaccatgtgggccgcccgtcagctcggtgacatcatcgagatcgaccaggccgacatcgataagctcaacgaccgctaccagaacgtctacggtcagcactgatttgatggagtgtccgccgcgttacggaaggcccgacgtaccttcgtacgccttcgccttccgcgccttgcggacacacacatcaaatcagcgctgactccgccagcacggtggcgtcttggctcccctctctgaggggagcctcggtcggcgaatgaaacttaaacaaacccccataaacaaagaagtaaaggaagtaaccctatggttatggaaaaccccttcgagggcaaggaaatctggttcggcgttggttcgcaggacctgtacggcgaagaagccctgcgccaggtcgccattcactccgctgaaatggtcgactacctgaacaacaccggcaagattccggccaagatcgtcctcaagcccaccctgaagtcctccgacggtgtcaaggagttcatggtcgaggcttccgccaacccgaacgtcatcggcgtcatcacctggtgccacaccttctccccggccaagatgtggattcgcggcctcgaagtgctgaccaagccgctgctgcagctggccacccagcaccacaaggaaatcccgtgggagaccatcgacatggacttcatgaacctgaaccaggccgcccacggcgaccgtgagttcggttacatcgtctcccgcctcggcatcaagcgcaaggttgtcgtcggccactacaccgatcccgaggtcgccgagaagctcggcacctgggcccgcgcctgcgccggctgggatgcctccaacaacatgaaggtcatgcgctggggcgacaacatgcgtaacgtcgccgtcaccgagggcgacaagaccgaggccgagcgcgtgttcggcgcctccatcaacacttgggccgtcaacgagctcgtcgctgcgtacgacgccgtcaaggacgaccaggtcaaggagatcatcgaggactacaaggccaagtacgacgtcgacccggctctgctggacgccaagtacgactccctgttcatcgccgccaaggaagaggccgcgatggtcaacatgatgcgcgccaacggctgcaccgccggcgtcgacaacttcgaggacctcggcgctctgccgcagctgccgggcgttggcccgcagcgcttcccgtccgagtacggctggggcttctccgctgaaggcgactggaagaccgccgtcctcgtgcgcatcggcgccgtcatgggctacggccttgagggtggcgcctccctcatggaggactactcctacaacttcaccgagggcgacgagctcgacatgggctcccacatgctcgaggtttccccgtccatcggcaccatcgccaagccgaagctggagatccacccgctgggcatcggcggcaaggccgacccggtccgcctggtcttctccggcaagcccgccaaggacgccgtcgtggtctccatgtccgacgttcgcgaacgcttccgcctgctcatggacgtcgtcgacgtcgttgagccgcagggctccctcaaggagcttccgtgcgcccgcgccgtctgggagccgaagccgagcctgaagaccgctgttgagtgctggatcaccgccggtggttctcaccacacctgcatgaccacctccgttggtcgtgaggcttgggaagacttcgcccgcatcgccggtgttgagctcgccgtcatcgacgagaacaccaccgctcgccagttcgagaaggaactggagctgtccgagatgtaccaccgtctcaacaaccagcactgattggcggagcgtataccgcctttcctcaggttcgacgtaccttcgtacgccttcgccttcggacggcggtctccgcacgcgccaatcagcgctggcaagccagcactgatgactaaatcaatctgctgactgctaccgctgaaaaagggctgttccgggaaaccggagcagccccttttgctgttatcggcaactccccacaaacgcatcaaaaatcgcctgcgagcgtggatctaccttgtagagaaactcgggatgccactgcacggcccacaggaagtggcttgccggccggtacagggcctcgatcacgccgtcgggcgcgacggccatgacctcgagtccagcagcaggctcacgaaccgcctgatggtgatagctattcaccgcaatctcagtctgccctgcgaacaatgaagccaagggagtgccgggcaccaaggaaacgttatgtccgaacgcatcgtacggcggattcatatggtgttcgatatcgctcggatgctggcttggcagatcctgccacaacgtgccgcgcagcgctgcgttgatgaactgaatgccacggcagatgcccagaatcggcttgtcccaagccattacagctggcagcagaatcgattccattcggtcgcgctcaggagagagcacctcgctacggccggtggcggaggccgctgcaccaaccatcggtcccacatccggcccacccgtaaacagaaacgcgtcaaaccgttcggcgcattgcgcaagaatgtcggcgtcatcggtcagcggcaacatgacgggcgtaccgccggcccgcattatcgcctccatatatccgggcagcatccacagactatcgcgtccgtaatccatcagcggagtcaccgcaatgagcgttcgattcgtagtcatgcctgcctcttttcgcccaggtgttgttttcgtcgttctgccgcgaatcgcttgattcagtggccgataatgccgccactgtaccgaaccaatgtaaccggtcggccaacagtatttcgtcagccagccgcgacgagatcgcacaatgtaccaatgatggggacattcggtgtgaccttgtcaatgttcgggccattgcactttcagcggggaaagcatgccccgtccgcgcatcatgatgaacgagtaaggttgacggggagggagaatcacatgaaccaggcatgcgtacgcaacgacaccatcgacgcgggcaaccatcatggccgaccgcaataccggtcgttcctgcgatttctgacatcgcaggaacgcaacgtcatttggctgttgctggccattgcttttcttccggtggacggcaccacgcttggcctgtacgcgccgttctggtcgccaatcagtccggcgctgttcgccgtgtactgcctatgcaattggcggcaactgcgcatcgcagccaaccggtacctgccaatgttcctcctaccggtggcctgcataatcctgtccatcccgggatggctgaagttcggcatccacctcaacgccgcgttcatgagcatcaccggattgctgggcgtgctcgccactttgggtgcgatcgcccttgcgttcgacatcaaacgcattccgtggcgtacgccattgcggattctcatcgcatcatactgggtttccttcggagtgggcgtcgtgcaatggctgtccatccgtctgcacgccaaaccgttgaccgactatttctcgcacctcatgtaccggcaatacatcagcgacaactcggtgtggggcggcggccgtccgcagttcctgttcgccgagcccagctatatcggcatgcacctgttcggcatactgcttccgctcatgtggctcatgcgcgggcgcgaccgcatctacgccaaacggctgcgtgacctcatcgtcacgtatgccgtcggcgcggtgctcatgcaagccggcaccagaatcgtcatcgattccgtcgtggcgttgctgatcgcccttgtggcgcgcaccgattggcatgacggcgcacgccgcgtccggggcatgctgcagattctcggcgcatgcgcactgggcctgctgggtgtgctggcggattccagactctccgccatcgcggaaaacggggccgagggagacggctcgttcttcgcgcggatctaccaaagcctcgatccgatatgcggattgctcacccatccgtggacgctgctcaccggttatggcgcgggcaacatcatcaatgcggtgtgggccggcgcggccaaagccggacggctgctggacggtcttggcatgaacggcggcgcggtcacgggattcgcggccggcgtgaacgcggacacggtgtggacgatgtgcgcgtataccagcgtcatcgccgaatacgggctgatcgggctggccatgctggtcggagcctcgatggtctgcatgacgcgcgggaggacggtatgccgtggcggtgcggatggcgcatcgtccgacgggctggcgcacggtgtttgtgtcgccgacgttgccgacgttgctgatgttgccgggggtaatagtggtggtggcgttgccggcgcgggttcgggcgaatccggcgtctggcacaagaccgtcatctgctggctcgtcctggtcgcatacctgtacatccaatgcgagaactatgcgttcgccgctctgccgcttctcgtgttcgccgcctcgaaggtgaggcgcgagcctgatttctcgcgggccgacgcatcgacgcggcccgagatggaccaaaatccagaataaccgacattcgccgctgttccgtttttcgctcaaggcgtatatctcccgtatcttgaggtgcatcatgtatcgtcgcggctaactaatcggcgaaacgcggcatgtttcgcattttgggcgaaaagcccaagtcccacaggaggtattgatgacgttcgttgcacggtcggtgcgctatgtgctcagaaaacgagtgcgaaccatagtgctccttataatactgaccatcataacggcgagcatgctatccacgatcgcggtttctcgggcagctcaacaggccgccggacgaatcgagaaggaagcggtcggtggattcgtgctgtccagcaacatgcagggcagcatgctcacgcctcgcggaggcggcatggtgcgccccgccgacgtgcgcaggatcgcccaactgcccggggtcgattcgtatatggtccgtcagaacgccaccgccgatctcgtgggggcgaatgtggcgaaggtccccggcggcgatgattacgatgcgacccaggagcagcagtttggcaacgccgccaacgtcatgggcacgaatgattcgtcgaaactcaacgtgttcacgtcgcgcacgctcggcatggccgaaggacgacatctgaaggcctccgacaagtacacgtcgatgatccatgaggatctcgccaaagccaacgggctcaaagtcggagacacgctcacgctcaaggccaacgcctatgacgccgacaacgaatcacattcgacggcgaccgtcaagaccaccatcgtgggcatattcaagggcgacagcgccagaaaggtatccagccgagcggaactcaccgccaacaccatctacaccgatctggataccacacgcgacctgtaccagtacaaggacggcaaggaaatataccaggacgccaccttcgtgctgtccaagggcgttgacgtggagaagaccatggatgccgcgaagaaactcccggtggattggaacaactatcagatcacgcgcaacgaccagtattcatcgagcatgctgcatgccgcccgcggcgtgcgctccatgatgcgcggcgccctgatcggcgtgaccgtctcggccgtgctcgtgctcagtctcatgctgctgctgtggatgaacgaccgccgtcaagagatgggcatactggtgtcccttggcgtcggcaagccctccctggtcgcccaatacctcaccgagatggtgctgatcggtctgccgtccctcgccctcggctggctgtgcgcgcagggaatggcccaatggctcggcgccacggcgctccattccgtgaacgcctccgcggcgaaggagctgagcagcatggggcaggtcggcggcgatcttgaatccagcatgtcggtgcgcaccctggattcgctcacggtgtcggtcgacgggaccgccatgctgtacgtggcgctcggattgttggcggtgatgctggtgtgcgtcgcggtggcgtgcatgccgatgctgcgcaaatcgccgcgagacctgtcggagattcgatgatgagcatgaatgtgtggaagcgtgccacgttggcgatcgtacgcaagccggtacgtagcggcatcatcggtctgctgatgctgatggtcttcacgagcctggtggcgcaggtcggagtctcgacggccctgcgtaccatgtccgacggcatcggcgcgggcatgggcatagggtttaccgtcagcgccggcgagaatcccattagcgccgaggaggcgagccggttctcgcgtatccccggtgtgacgaagaccgcctatgcgacgaagaccttggcgcaggtggatggcgcgcgcccggtcatgccccggcagggcccccgattggactccgatctggccatgcaggtcagcgtgctgggcaccaccgattcctcattgtccgaggaattccagagcggcctgtaccgcctggagcagggccgccatatctcgggcgacggcgacaatgtgctggtccaccgcgacttcgcgatgcagaacggcctatcggtcggctcgacattccgtctccggcaggaggggcgcaacgccacggtgcgtgtggccgggatcttctccggcaacgtgcaggcccaaagccccctgccctcggacacttccgagaacctcatctattcgggtaggcgagtagcttccgctctgaccggaaacgaccggatcgacatgatccgatgcctgtcggataatccgcaggacctgtccgcggctattggacgggccaagaccatggccggcggcaagtacgacgtcaccgacgattcggcccggctctccggcgtcctgcaatccgtgcagacggtgcgtaatctggtgcgcatggtgctgctgtccgtctgcctcgcggacgtactggtgctggcgatggcgctggtcttctggattcgctcacgcatccatgagataggcacgcttctggccctcggcatcgacaagatgcggatcgtcgcacaactcgccatcgaaaccggactcatggcggcggtcgccgccctgtgttcgctgggcaccggcgccatgctgtcgggatacgtgtcttcccgactgttgcgcgattcgggcgtcgcgccgttggaatcgttgcacgtggaggccttgccgcctgagcagacgatgctcatcctgctgctcggatgcgcggtcatcgccgtggctcttgccgtgtcatgcgccgccgtgctgtccaaatccccgaaatccattctttcctctatgcgttaggagtcaccaatcatgtctaactgtctgcaactggaccatgtcgattacgcctacggcgcggcgaagatccgtgttctttcggatgtcagcgcggatttcgaatccgggaagatgtatgcgatcaccggcccgtccggcgccggcaagagcacgctgctgtcgctgctggccggcctggacgccccctcccggggagtggtccgcttcgaaggggaggacatcgccgcatcgggctatgcgaagcaccgccgggagcacgtgtccctggtgttccaggaccataacctgatcgactacctcacccccgaagagaacctgcggctggtcagcgccaaggccgatatgaagatcctcgaggaactgggtttgagccgtgaggaatccaagcgcaacatcatgcacctgtcgggcggccagcgtcaacgggtggcggtcggccgcgcgctggtcgccccgggccgcgcgatcctcgcggacgagccgacgggcagcctcgacccggagatgaccgacgaggtgattcatctgctgcagcacgccgcccatcagctcggcaaatgcgtgatcgtggtgacgcattccaagcgcgtcgccaactccgccgatgtcgtgctgcgtctcaggagcaagaaactgacccgggcatgacccacctgggccgggcggcaccccggcgacgacccgcatggaatcatcgtcataatgacgcctgcgatccctggacatgagaaaccgcacctccgatcatcgaatctggattactccagtccaacaatcggggtgcggttcaaaaggccctttttttgtgtcggattacgaaccgcgcgtctcaccgcttgccgttgtagatctcgttgtcgatcacatcggcgaacacgcgattgacggccgggcgcaccactttcagcgacggtgtcaggcacttgttctcctgcgtgaactgcgtgtccagcacggcgaacttgcgtacggattcggcgcgcgagaccgtcgcattcgccttgtccacgtactgctgaatctcctcgcgcaccgcggcattcgtggcgagccggtcgaccggcgtctccgtggacaggccgtgcgcgggcagccacaatgccagcgactccggatcgagcgtcaccaacgcgccgatgaacgggcgctggtcgcccaccaccacgcagtgctccacgatcgggcacttggcgatctcttcctccagcggaatgggggagacgttcttgccgccggcagtaataataatgtccttgatgcggccggtgatgacgatgtggccctcatcatcgatctcggccaagtcgccggtcctgagccagccgtcggcggtgaacgcctcggccgtcttctccggcagattgtggtagccgcggaacacgttcgggcccttgacctgcagttcgccttcgtcggaaatgcgaatcgaggagccgggcgcgggctggcctacggtgccgatcacattgtcggtcacgcgcgtggcggcgaacggggcggcggtttcggtcatgccataaccctgaatcatcggcagtccgatgccgttgtagaaatgcgccagatcgagcgacagtggtgcgccgccgcaggccacgtacttgatcttcgggcccagagcaccgcgcaccgtgcggtagacgagcgtttcgtacttggcgcgctcggcgatttcggcaaacgtgtgctgctcgccggcctgctccttgcggctccagacgcgcgcggcctcagcggccttgacaaacaggcggcccttccagccggcaccggccttgtgcgaggcggcgttgtacaccttctcgaacacgcgcggcacgcccagcaggtaggtcggttcaaacgaacgcaggtccggcagcagggttttggtatccggcagataaccgaccacgccgtcatcggaggcgatggaggcgtactggatgaatcgtgcgaagcagtgggccagcggcaggaagagcagcaggcgcggatggtcgtcaagcaccacttcatgcaacgcctgcgaggcggagatggtgatggacacgaagttcttgtgggtcagttcggcacccttcgggttgccggtggagcccgaggtgtacacgatggtggccaggtcgcccgtgcgcacggtggccacgcgctcgttcagttcctcgtccgaaacagccacgcccagaccttcgagcgcgcccaacgcgttgccctcgatcatgagaatctgcttcaaggcagggcagtggtccttgaccgagtcgagccggtcgaagcgctcgcggttgtcggcaaaggccagcttgaccgccgaatcgttcatgatgcgctgggcctgcggggcagagtcggtgtcgtagatcggcacgcttaccgcgcccaccgcggccagtgcgaaatcgagaatgccccattcgagacgggtggaggaaaagatggtcaccgcgtcgcccttggcgatgccgagcgcgatcaggcccttggcggccgagaccacgcgctcgtggaattcgccggtggtgacgttctgccagcggccagggccgattttcttggcggcgattaccgtgtccgcgccggtgcgggcaaggcgatcggtgagcagtgaatagatagtttggtcatcgcggatctcgatggattcgccgggcgtggtgtattcggtaagcatacggccgtttattccttacaaacatgatggcaagttgacaacccgagccattctgacgagttagattacgctggcgtaaggttgcgcgcgttgtgggcaatggagaagttgtctgtctggttttgtggattgtatacaacgctgtgtctaaccggtttgctctacggttatgaccgtgtccatttcgggagccatcgacttcctgcaggacaagtacgcgctgagcccggccctgcagggtccggtcatcagctccagcatcatcggcggcgtcggcattggggagtctgtggcttcttatttgggaacgaagctcagcgtgacagtcgtctcagctgaaggtctggcgtgtatgtgcgctttcgcctaaggtaaataggattgcgcagtgcacgccatcggtatgtgcaggtatgcgattggtggcacccgcgactgatgcatgacgagacctactgcagtaccacggcaaccaacacggcaacaacacggcaaggggaagcgcaacatgtttgacaaacgactgttccaattggcaccaggtctcggcaagctcatagccggcaaagtggctctgatgtgggttgggctgcttgccaatatcggcttcatgctttcgctggtcatgctgctgcaaggactgctcgccgcagccgacccacacactttctcctgtaacgccgcctcggcctccgagtgccccgccaatctgttcggcgttccgggcaccaccgtcgccccgatggccggcgacctcatggtttacgtggccttggcaatcgtctgcatgctggttcgctacctggccaccacacacgccacacgcctcggcaccgaagccgccgaacgggtcaagctcgctttgcgctccaagctgtaccgcaaaatggtggccctcggcccgtcctacaggtcgcgcgtcaagacctcggatgtggtccagtccgccggcgaaggcgtcgagcagatccagagcttcttcgaactgttcctgccgcagctcttctatgcgattcttgcgccgatcaccctgttcgccgtgattgcgccgattaacatgccggccgccgtgaccatgctcgtctgcgcgccgctcattattattgtcaccggcatcgtatccatgaccgccgcccgcgccttcaaaaaatactggggccgatacaccgacatgggtgccgcattcctcgacaacctgcaaggcctcgaaaccctgaagaacttcgacgccgacgaccgtgccgccgccgaaatggacaagaaggccgaaggcttccgcgtcatgaccatgcgcgtgctgcagatccagctgcgctcgctgaccgccatggatatcgtggcctacggcggtgcggcggccggcattggtgtggctctatggcagtatgcgcataccgccgcggccgccgcaggagccagcgccgccggctggtcgccggtcatgctcgccgcccacctgtccggtgcgttcgcctacctggcctacggcctgcaatacctgatgccattcggagcgggcttcccgctcaccctcgccggactgttgctgatcgtgctgctgtccgccgaattcttcatccccatgcgccaactcggctcctacttccacgtggcgatgaacggcatgacctccaccaaacggatcttcgccctgctggacacccccgagcccgcccacggcactgccacgctgccggccaccgctggtaccgatgccgggactgatgccggtaccaaggccggtaccaaggccgatggcggaatcaccgtcagcttcgaccacgtcggctattcctatgacagcgccgattccggtgccgccgttcaacaaacgaattccgcgccggcacctgcgctcaccgacctcaccttcactgcctaccccggtcaactcaccgccatcgtcggcatctccggttccggcaaatccacggctgccgcgctgcttgccggtacgctgaccggataccaaggctcgcttacgctgaacggcgtcaaggtatccgacctgtccggagagacgctcgcccgaaccatcaccctgatcggtgccagtagccatctgtttgccggtactctgcgtgagaaccttctgatggctttgcccgatgacggccagaacggtgaagccgcgtccgacgccgtggattcccgtctctgggatgcgctcgaacaggcccgtatcgccgacttcgtgcgttcgcagccggacggccttgacatgacgattgagcccgacgccgccaacctgtccggtggccagcgccagcgtatcgccatcgcccgtgcgcttctgcatgattcgccggtattcgtattcgacgaggccaccagcagtgtggatgtggaatccgaggaactgattctcgcgaccatccgcgaactggtgcaatccagcggcaagacggtgatcatgatcacccatcgcatggccaacgccgagcacgccgaccaagtggtggtgctcgaacacggcaagtcggtggaaaccggcacgcatgccgaactcatggcggccggcggcgtgtacgccaagttgttcactactcaggcggatatcgagaactttgggggtgacaaccctcagcatgggacgcagataagctcccgctggcgggagctggccgacgacagtcggactgagggtggttcgacgcgagtaagcacagagaccgacgtaacggctgaccaccctcagccagcttcgctgacagcttccgccagcgggagcggggcggctgtgggcgcagctccggctgcagctccggccgagatgagcacgttccaggtcatcaagcgactactcggggaggccaagccactggccgggcttatggtcgcggcttccacggccggcaccatcggccaccttgccgcaaccttcctgccggtgttcggcatcatcgccggattcgcgctcgccggcaaccccgtgtggggcatgagtgcggccggtgcaatcaccgccatgattgtttgcgcggtgttgcgcggcctgacgcgctacgttgagcaatatctgaaccacaacgtggccttccacctgctcgcgctcttccgctccaaggctttcgccgcccttcgccgcctcgctccggccaagctcgccggcaagggcaagggcgacctcatcgccatgctcaccaccgacgtggaactgctcgaaatcttcttcgcgcataccatcagccccgtggccatagccgtgaccaccaccatcgtctacgccatcgtggcggccacgctgagcccctggatggcgttggcgctgatcgtctcccatctgatcatcggcatcattgtgccgcgcttcttcgccaccggcgtgcgcaatctgggccccgccatccgtggcgcggccggcgaactcgacaacgtgatgctcgacgacatgcgcggtctcgacgagatcatccgattcggtcggggtgaagatcgtgcgcaggccatcgaagatcgcacgcgcgcgctatggcgtgaccatgccaaactcagccgtgtcaacggccggttcgccggtgtcggcggattgctggttgcattgcttacctcggcggctgccggcatcgccatcaatcttgccggcgtgaacctctacgatatcccggcgctggtcgccgccttcgcgctgctcgccagctcgttcgggccgacgctggcgctcgccgccctgcccgcgaacctcacccagaccttcgcctccgcccgtcgtctgttcggtctgatggacgaagcgccggccgtggtggaaactggcactgcgaactcggattatgagggcatgcgccttgaccgcgtcatcttcgcgtacccgggggaggagagcgaggcgattctcgccgacttctcgctcgatgtgccgcagcacggcatcctcggtatccaaggcccgtccggccggggcaagtccactatgctgaagctgctgatgcgctattgggatccgcagcgcggccaagtgacgctgtccggcacgccgctaccgcaaatcgatgtgcatgcccgccgccgtattcaggccatgatgagtcaggagacccacctgttcgacggcatgattcgcgataacctgcttatcgccttgcccgaggcagagattcgcgatgggggagcggccggtgttcttgacgcccgactccgcgaagccctcgccaaggcatccgtgctcgacctgatcgattccctgccggatgggctcgacacccaggtgggcgagctgggcgaccgactgtctgaaggcgaacgccagcgcatcggcttggcccgtgtattcctgcgcaatgccgacttggttctcttcgacgagccgaccagtcgtctggatgccttgaatgaagccatcattctgcgttccattcatgagctgtccaagagcgagcagaacgcggataaggggcaagacgtggctgtggtgctggtctctcaccgtgaatccgccatgcgcgttgccgatgcggtgctgaatctgtaaagtcgcacagtcacaggccgcaatactctgcaatacaggatttccttatatatcagcctctgataagggcattcagagagtcgagggccgcgtcgatggcctgagcctcgcggtcgtcatccgtctcggcgaaggaatgctcgctgtaggaatcctcgtcggcactgggcaacaacactccgcgaggcgtatcggcactgtgcgcgtgctcaatagaggccatatgtgccggctgcacggcatttgtctgcttgcggtttcgattcgcgtcattcgcggaatcaacggcatctgcggcatcaacgctatctgtatcatccgcaccactgcgcgtagtcggccgattcgccagcgtgaatggatcgtcgggcagtgaatcggccaaggccgcgactgctgcgctggccgctgcctcggccgccgcgccgtccagcatcgcaccatccgcagagtcagtcacggagccatccacagagccatccgcagggccgttcgcagagccgtccgtatactcaccgtcgtgccgtctactggatgacttaccaaccagaacagcgcccctcgtacgccgcataagcgacggcacgttctcatccgtcgtaacttccgagacggtcgctgccgtgtcttcttctgcagccatattcgccgctgccttggcggcttcctcggcagcgcgctgcgccgccagccgttctgcctcggcccttttggcggtctctatagcgaaaatcttctgctgtgccgcagcgcgagcccgctcagccgcatccataatgcccaatgcctgctgacgttcgttttcaatacgacgcagcgtggcttccgcgtggcggatattcgcatcagccgtgctcagcgcgtattttgcgtaggccaaatcggttttcggctgccatagatgctcgatttcctccagcgtgcgtcccattgtctccggcaccaacgccacgatgccgaacaggcaaatcagatccagaaccgcgaaaatcgcgaacgatatgccgtcgcccaatccatcgatcatcatcggcgtgaattgtgcgatgatccagttggcgaacagcagacacatcacacataatccggtggcgcgaccgcgcagatacgtggggaagagctcgggaatcacaatccagggaatcggtcccatcgaaaaggcgaacgatatggtgaacgccatgacgaatataagcgtcagcagcgaattgcccatgaaatacgagcccgaaatgcatagcgcgaacacgcacatcatgccggtgcctatttccataagacgtttacggccgaacgtgtcgatcaggtacatgcctaccacggtggccaccagctccatgccgcctacgctggcggccgcgaggaactgagtgtccccggcgaacccgagatccgagaacatcaccggcccatagtaggaaatggcgttcatgccgatgaactggttgaacacggcgagaaagatgccgatgacgagtgcccgtcgcaggcctggacggaacaaatcatggaattcgtgcgacatctcggtttccagtttgaccgaggcttggatgtcatcggtgcgcaggcgtgcgcgttcggtgccgaggatgtgctcgagcaccgcgaaaccttcatcggttctgcctatctgaatgaggaatcgtgggctttccggtgccctccgcatagccagcaggaaggcggcggccggaatcgcgcctaatcccagcatccagcgccatccagtggcgatatcccagtcgtttgatccgtgggaggcaatgatgtagttgatgacgttggtcaggaagataccgcaaaccgcaagcagctgataagagaaggcgagcagaccacggatgttggccggagccgattcggtgatgtatgtgacggccagcgcggcggtcaggccgatgccgtagccgccggccacgcgcgccacgataagcgctatgggacctatcgtcagcgcactccatacagccgcaacgaggaagaacgcgccgccgataataaggatacgtttcctgccgaatcggtcggaaaggaatccggcggtggccgctccgatgacggcaccgagcatgatggaggaaacgacgaggccctccatgagagtactgagcccgtatctggcgcgcaggaattcgatggcaccggagatggagacggtgtcgtagccgtacagcaatccggcaagacccgcactcaaagccagtccgaatgtatattttcctgatccgcgggtgcgtatggctgtccctaaaggattgggctgcttggaagcagtccgaaacagtcccgccatgtgctcttcctctcaatacagctatggtggtgcctattcatactagccgaactggctccgtctggcgctggacatccacgaatgtgaacgctctcggaattgtggatgtcggaggctgaagattcttctgtgtgcccgaggtggcgagttttggcgggaaatcaggcgtgtcgcttgattttgacaaattggtacacgggtgtatcatcatagatattggtacacgggtgtaccaaagaaaacaccccaaaaaagaccgtcagcggagcatatcgcaggcgaggaacccaggcccaaggtaagtccaaagtcccgaagccacgaccaatcccaacggctcaggaggagataacatgcgcaacaccaagaaggtcatcgcagcaacggccgccgccagcaacatagcatcggccatgagccggtacaataaaggacttgattgatatgactactcgtagaacgttcaggtggccgtccctgctgactgaatccggtcgtggcatcgcgttcggcggcgactacaatccggaccagtggcccgaggagacactggacgaggacattcgcctgatggtccaagccggcgtcaacaccgtggccctcgccatcttcagctgggacaagatcgaaccgcgcgagggcgagttcacgttcgagtggcttgaccacgtgatcgacaagctcggcgcggcgagcatcgccgtggacctggcatcggccactgccacggccccgttgtggctgtacgagcgtcatcctgaggtgctgccaatcgatcggtacggccatgtggtcaatgcgggctcacgccagtcgtggcagcccacaagcccggtgctcaaggaatacgcgctgcgcctgtgccgcaaacttgccgaacactacaaggacaatccatacgtgacggcctggcacatgggcaacgaatacggctggaacaaccgctacgactactccgacaacgccttggccgcgttccgcacgtggtgcgaggccaaatacgggaccgtcgacgcgttgaacgaagcgtggggcacggccttctggtcccagcacgtgaacagcttcgacgaggtgttgctgcctcgccacatgggcggcgacagcatggtcaacccgccccagcagttggattacgagcggttcggcaacgacatgctgctcgacttctacaaggccgaacgcgacgccatcgaagaaatctgccccggcaagccgttcaccacgaacttcatggtctccaccgaccaatgcaccatggactacgcgcaatgggcaaacgaagtggacttcgtgtccaacgaccactacttccacgagggtggatcccatctggacgagcttgcctgctcggacgcgctcatggactcgctcgcgctcggcaagccgtggtacgtgatggagcactccacctccgccgtccaatggaagccgttgaacacgcgcaagcgcgccggcgagctcatgcgcgactccttggcccacgtggccatgggtgccgacgccatcaacttcttccaatggaggcaatccgcgtcgggtgccgaggcgttccactccgcgatggtgccccacgcgggctccgatacgaaactgttccgaggtgtgtgcgaactcggcgccgcgctgaagacgctgtccgacgcgggtgtgcaaggcacggaactgaagcgcgcggacacggcgattttgttcagcgcggaatccgaatgggccactcgctccgagaccctgcccagcatgaaactcaatcactggcatgacgtgcgcgactggtaccgtggctatctcgatgccggagcgcgcgcggacgtggtcccgctcgcctacgattggagcggctaccagactatcgtgctgcccaccgtgatcgccctgtccgacgaggatgcccgtcgcatcgcggacttcgccgaaaacggcggtacggtcatcgtcggctatgccaccggcctgatcgacgaacacttccacatcggtctcggcggataccccggcgccggcaacggacttctgcgtgacatgctcggcatccgctccgaagaattcaacatcctcggagaagaagccgaagacgaaccggccgaaatcggtttgtcgaatggactcacgacacgtctgtggcagaatgacgtgacctcggtcgctccagacacttgcgtgcttgccacgtacgtgggtacagccgctgctgattgggagctcgacggcgtccccgccatcaccagtcacccctatggcaacggtaccgccatctacgtggggtgcgaccttggccgccacgacattgcccgcctgcttaaggagttcggttcctgctggcgggagctgtcggcgcagccgactgagggtggtcaaactccaacctatcccaccacagatccccgcatcctgcacaccatccgccgatccgcagatggctccactcgcttcgatttctacctcaaccgctcaaaccagcccgttgccgtcaacggcattgagggagaaccaatcatcgcctaccgttgcgaggccgacaccaccggctatacgctgaatcgcaatgccattcttattgctaaagcgtcctgctagaccgcgctagaatggcaatgttgtccagatagaggagtgcggcatgagcgacgagaaaacagccaagcgtcgagtgacgctacgcgatgtcgctcaggccgccggtgtatcgctcaaaactgcgtcgaacgtgatcaatggctctgggcgtatgaccgatgagacccgtgccaaggtcgagtcggtcattaaggacctcgactaccgagtcaacgtggccgcccgcaacctgaatcgcgatcacaccggtttcatcacccttgccgtgccttcgctgattccgccatatctggccgagttggccaatcgcaccattgacgccgcccgtcagcgcgactactccgtatacgtcaccacgtatgcagaaggctcggccaaaggagcgcgcgacctgctcaagaacttcaactccaccgtgtcagacggcatgattctctccatgagcgaggtggaggatatttcgcccgaagacctgaaggtcgatttcccgctggttattgtcggtgcccgaaccacatggggtgttgccgaccacgtgactccggacgatgttgccgccgcagcaacagcggcaggctacctatacgatcgaggttcttctcgcctcgctgtagtgggtgcacgagacgactatgacgcggccgctttgttgcaggctgtggaaggcaacgcacaactgcgtttgcgtggtgtcattgaagaaacgcgccgccgtggactctccttggatccgcagctgattggcaacaccggtcaggattggaccatcggagccggtgcccgtgtgatccagcggctcattgattccggcgtgccattcgacggtgtgatcgccctgaacgatcagttggccatcggcgcattgaccgctctgcgcaccgctggttatgaggtgcccgcgcaggtgcaggtcatcggcttcgacaacaacgaggaggccccctacctgcagattccgctgaccaccatggattcccgccttgactggacggctcccacggcagtgaatcgcatcctcggacgcatcgacggcagcatcaccaagcccgaactgctcaccaccgaatcccaagtcatcgcccgcgcctccacacgctgacgctaatctggctcccctccctgaggggagctgtcaccgaaggtgactgaggggagtcttgcggaacattgtcatctcccgtcgtaactcgtaattgtcactcgtttgaggggccccatgtgtcatcggaggtagccgttcactccgctccgagttcgtgcatctcccccccccacgataagagacgccgttcaatcgtttagtgactttttgttaatttctgtgcttaagtagcaactttatgtgtgttttctctacggtctggtgtatattattttttggtttaccggtgtatcgcacgcgcgatgtgtgaattgccgcaacatcgctgatatgcgtacatggaatctggaggaatgtatctgatgacggcatcaactgaatcgtctacgcaatcccatcatgatgagaaagaggccattgctcccgcgcgacttgtggcctacgcgctcggcaacttcggccagtcggcgttctacaacgcgctaagcacctacttcgtggtctatgtgaccaactcgctgttctccggagtggacaaggccgtggcgggcaagctcatcggcatcatcacctcgctgatcgtgatcattcgtatcgcggaaatcttcgtggacccgctgctgggcaacctggtggataacaccaccaccaaactcgggcgattccgcccttggcagctcatcggcggtctggtgtccgccgtgctgatcgtcatggtctacactggcctgttcggcttggtcaacgtcaacaccacgctgttcatcgtcctgttcgtggtggtgttcgtggtgctcgatgtgttctactccctgcgcgatatctcctactggggaatgatcccctccatctcttccgactcccatcagcgcggcatctacaccgcagccggcaccttcaccggatcgctcgggtacaacggtctgactatcgccgtgatgcccatcgtcaccttcttcagcttcgatgccggccagcagaaccagaatggttggaccgcgttcatcatcatcgtggccctgctcggcgctctcacggctctgagtgtagtgttcggtgtcaaggaaaaacagagcacgctgcgcaccaaggcccaggagaacggtaacccgattgaagcgttccgcgccctgattcacaacgaccagctcatgtggaccgctttgtcttatgtgttctacgccgtcgccaacgtggccaccggtggcgtgatggtctacctgttcaaatacgtgattggtcgcatggaccttttcccggtcaccggcgtcatccctattgcgtgcggtctgattatgtcggtactgttcccggtcatcactaggtgggtgccccgccgttatctgttcctcatcggcatgtccgtgatggtcgtggcctacctgctgctgattgtcgcctccacgaatataccgctgctgctggtggcactagtgctgttctacctgccgcagacccagattcagatgaccgtgatcgtgtgccttgaggactccattgaatacggccagctgaaaacaggcaaacgcaacgaagccgtgacgctgtccgtgcgtccgatgctcgacaagatcgccggcgcattctccaacggcttcgtcggcttcgtggccgtggccgccggcatgatcggttccgccaccgccgccgacatgacggccaaggacatcaccatcttcaagaccttcgccttcatgattccgctggtgtgcattgtgcttggcctgattgtgttcgcgattttcgtgaagatcgacgaaaaggcccatgcgcgtctggtcgccaagctcactgagaatcttgcgacggctggcgatggtggtggtaacgacgatggtgttggtgttggtgttggtgttggtgttggtgacaatggtgagcataatggtggccacgccagcatcgcgtcggaagattccgcattggcggaatacggtcccgaactcgccaagcgggtgttgctcggcaaatagtgttgctgtgcgaatgagctgtttcatggggtggtgattggcccatggggcggtgaattcctcatggggcggtggctgaaaatggctttattctgcggaaggtaaaattttaccgaccgccccatgggcaagttaccgccccatgggattttcgccgccccatggatgtacgggtaaaggcggccgaattgcctcgtgccgcccccgtggatatgcaagttaaagagcatcggcagcatgactgaatgcacatagagcgtcccccgcatggttgtgccacgttccatggcggggtcgccgtggtgactgtcgccagtacacgccatgccacgcgagcacgttgttgccggtgttccatggcggaaacgtcgtgggcatacaccttggatgatggcgacgacgattccaacacagtacccagtaaagtaaccgccgataacctcaagaaatacgacatcagcccgcaaggccaggccgatgagattcgcatggtcgccgaggccgtgaacaatatcggcgacaacgatggcgatggcgataagaccaacggtgcgaatggcaacaaggctactggcgtgctgagcaagaccggtagcgcggtgactgccgtgggtcttgcggtcgtcgttctcggtgcagccggcggggtctcgtttgctttgcgtcgtaagcgctcctgataaggactgactcggcattatgatgcggttgccagttgctggctgtcggctgtcgtctgccagatgcggctgtctcggcgtagcgatgcgattctgtcccggttcgcgcatcaatcgattgatgttaataccgggacagaaatcattgtcccggtttgaaaaaacgggcgtttttcgcgtaccgggacaattctcgttgccccgatacgagcgtcaatcgttttatgtgcgaaccgggacaacatgtcgatctcgggattggcggtattccgccgattctgcttgtcggggtatgtggactttgaaaattggtttgtcccggttctcaaaaatgggccgaaattgcgtaccgggacaacgatttctgtcccggtagaaacgtcaatcgattgatgttttcaccgggacaaattcgtgcccagaggaggggaagaggggctccgcaatggcgctgggcatcattgtggttggaggcaaattcgcgtccgggaacaatagggcggggccggtcgcaggagtagagcgtgatgttgtcatgattgcgcccggctctcccacacggaaggccgggcgcaatcatgccgtttggttgcagcccccgcacatcacccacataaccgtgtacagtggcgtgtagtcgaagcaacgaaggagcatcgcacatcatgaccaacggacacatcaaccccgccaacgtgccggacatcgccttgaaagacggccattccattccgcaagtcggcctcggcgtgctacgcatcgacgacgagggcgtggtccccgtcgtcgaatccgcgttgggagccggctaccgccatatcgacggtgcggccggctacaataacgaggccggcgtgggccgcgcgctcgccgcctccggctacaacaccggtgccaagcgtgagaccctgtgggtcaccaccaagctgcgcgactccgagcagggctacgactccgcgctcaaggcattcgacaactccctgaaactcctccagctcgattacgtggacatgtacatgatccattggcccacgccgttcgactggcgcagcaccgacacctggaaggcgttcgtcaagctgcgcgacgaaggcatggcacgcacactcggcgtatgcaacttcatgcccgccgatttgaagcgtctgcacgaggagaccggcgcatggccggccgtcaatcagattgagctgcaccccacgtggcagcagcgcgaagtggtggcgttctgcaaggagcacggcatcgccgtggaggcatactcgccgatggcgcgtggcgccgacctcaacgccggcgacggcaccatcgagaagatcgccgccgcccatgaggtcagcccggcccaggtgattctgcgttggcacatcgaaaacggcacgatcatcatccccaagtccgtgcatgctgaccgccagaaggagaatctcgacctgttcggcttcgccctgaccgccgatgaacacgctgccatcgacgccctcgacggccccacccgcgccggccacgaccccctcaccttcacctatgcgtgattgatggcacgtcgtaacgcccacttccgccgtcgtttcaacgcttctggtccgctggagcgcgtgctgattctcatcgttctcgccgcagcaatcggcgtgaccatcggcctgctactgccgcaggtcagctccgacgcggccaaaatcacaggtggctacactgccaccggttcagccgccgacactttgaacgcgctcgccgtagacgacaaccaaagctcctccggctacgaccgcgattccttcggtttccgcaccaccgacgtcgacggcaatggctgcgacgtacgcgacgacgtgctcgcccgtgatctcacggacatcacctacaaatacgccggttcctgtgtggtcgagtccggcacactggccgatccgtacaccgctcagaccatccattttgtacgtggccgcgccaccagcgccaaagtgcagatcgaccatgtggtggcccttgaaaacgcttggcaatccggtgcgcgcgactggtccactgccaaacgccatgaattcggcaatgacccctataacctgctggccgtcgacggtccggccaatcaggagaagggttcggcttccgccgcctactggctacccaccaacgccgactaccgttgcgactacgtggcccgccagattggcgtcaaagacaagtaccagctcaccgtcacctcccaagaaaaggacgccatgctcgccgtcctccacacctgcccgggccaggccgtgcccgcagacgaataggggctaccgctcaggattgttgagcataggtgcctgcccctcgtcataagcgcgcaggagccgtcggagcaaaaatgtggtgaagtatggtgcggtgaacacgtgttcgctgctaccgatattgccggcggatagtttcacgccgaactgaatttccggataagaatccgaagcgattagcgtccgcatggatttggcggtgccttttttcgatttcacctccaccggcaccagccattcgcgcgtgcggacgaagaaatcctgttccagtgtggaatcctcttttttgtagtagtacaggtcatagccggatttccgtagcgcttcagagacgatgctctcgtacatagcacccttatagacaccaagattacgattggcccgcagatcatcactggcctcgtcgtcaagcatcgctacgaacagaccggtatcgccgaaatatatcttgaacttgttttcgtcataattgcctttcaacggcagttcaggataggacatacatcggcagatattcaccattcccgaggtttcaagccattccacgcatcctcgatagtctttgaaacgcgctccgctggcaaccttgctgatttggaacttcttgttttccttggcgagttgcacgggaatatggttgaacacgttgagaattcgtgcctgatcgagtccttgcgcgtatttgcggatatcctcctggtagtccaaaataagctggcgctgcaattgcactgttccctcgaacgtgccagtgcgtatatgggaggcgacaaccgcaggcatgccgccaagcacgcagtaatccataaatgccgtggagaagacgttcatttccacttcagagaatggcgtagcatcacacaggtgggtgaacatgctttcgatgacggcctcatcgtatccgcgagcccacagaaattcctcgaagtccaacgatcgcatttcgtagtcggtcttatatcccacgctattgctttcgatttgcttatagctgatgcccaacattgaaccgctgcaaatcacatcatatttgccgtcgattttaaagaacttcagtgcagtggcgatatcaggatgggcctggatttcgtcgaaaaagatgagcgtatcgcccggaatgaactttttggctgggtcgatcagggaaatattgcggacgatggtatccgcgccataaccgtccgcagtgattgcacgatatttcggttcctcaacgaagttgatttccactaccgaacggtagttgtgtgcggcaaagtaatcgatagtcgctgtcttgcctacttgacgagggcccttgatgattagcggggagcgattcgggtcggatttccatgcattgagataggcatcggctttgcgtttgagatacataaggagcccctttccgaattactgctatatcaatgattttacactttcatgagcgagttttctgccgtctggcacatttcatgagcgagttttctagtaatttcctcatttcatgagcgagttttcggcggtttgtcacatttcatgagcgagatggcgggaaatgccagctgccagtccgccagtcatccatcaatcgtccgcagattgtccgtctgttgacgtgagaaacatgcccgcgctataactgagcccggtatgaagggagaagggaataggaacagacgatatggcagtaacacacaccgcagcagatgccactgcggcaaccactatgacgaacgccgtggcagacatcgaacaggaaacaccggaaatcgagaaggaacgccagcttgccggagtcggagccggagctggaaccgtggcaaacggcaagaaaaagccgcatgaccatgcgctggccagcatcctcggccccgcgttcgtggcggccgtggcctacgtcgatcctggcaacgtggcggccaacatcacctccggcgcgcgatacggctacctgttggtgtgggtgctggtgctcgccaacgccatgagcgtgctcatccagtatcagtccgccaaactcggcatcgtgaccaacaaatccctgccggaactgctgggtgaacgtatgagcgatgccggccgcttcatgttctttatgcaggccgaggtcatcgccatcgccaccgatctggccgaggtgatcggcggtgccatcgccctgaacctgctgttcggattgccgctgttcatcggcggtctggtgatcggcgcaatctccacggtgatgctgtggttccaaggtggcaagacgcaaaccacgttcgagcgcatcatcatcgtgatgctgctgattatcacattcggcttcatcgcaggcctgttcgtggccccgccgagccccggcgaagtggtcaagggcatgattccacgcttccagggcaccgactcggtgctgatggccgcctcgattctgggcgccaccgtgatgccgcacgccatctacctgcactccacgctggtgaacgaccattacgcaggcggcgaaaagccgtcgatcaaaacgcggctgaaaggctcgaaaatcgatgtggcctgggcgctgttgctggccggcaccgtgaatctggcgatgctggtgctcgccgccaactcgctgcacggcatgtctggcacggattccatcgacggcgcacagcgggcgatcacgcaggtgcttggcccggtgatcggcacgatcttctccatcggcctgctggcttcgtcgctgagctccacatcggtcggcacgtatgccggctcggaaatcatgcacggtctgctgcacgttaacgctccgatgtgggcctgccgcgtggtcacgctggtgccggcactgattgtgctgtggttcgccaaggacccgactcaggcgctggtcatcggccaggtggtgctttccatcggcatcccgttcgccgtgattccgctgatgcgatacacgcatgacaaggaactcatgggcaagtgggctgatggaaccgtcaagcacgtgatttttatgattgtggtggcactgattgtggcgctcaacgtgctgctgattgtcctgacgctgatgggcagggcgtaatagactccagctgaaatcctgcgatagcacaacataataagaagccccggggctggaaccggggcttcttattatgttgagaatggttgaatctgccgtcagttcgcagccatacgccgcgcacgccgttcgcgcagcgcgcgcaaggaaataatgtctcgcgtacgaccggcaccgtcgcccttgacgccgaagaacaccatcaacaccattgccagacagattattgcggagattcgcagcgcccattgaatgccgaaaatcgaagcggcgacggcggaggcgccgccctgcttatgcaaagcggcaaacgtttccatcagaatcaccaacacgggtgcgcccacagcgcccgcaatctgacgcgcggtattcgtcaccgatgatccggcggacacttcgctcggcccgttcaggcaattcagggaccacgtggtaatcggcatcagcaggaaacccatgccgatctgacggatgaactggcagatcgatacccaccagatccacgtatccatcgccaccagcgacatgcccaaggtgccaagggtcaacacaatcgaaccgaacaaagccaccgggcgcgcgccgaaccgatccatcgcgcggccgccgaagaactgggagacgcactggccgatggcgcccggcagcatgatcagaccgctcatcgtggccgaatagccgcggtcagtctggatgtagagcggcatgatgaccaaaatcgaactgaaggcgaaaaatgccagcgacgcggtaatggtgccgacggtgaacgaagggttcttcagcacttccaagtccagcagcggcggctgggggagtgccgactcgtccttggctacggcctcgcgataccgcttgccagcgcgcaggttacgcagcacgaaccagacaatgccgaccagtcccacaaccatcggcccccacgtgaccggtgccgcgaatccataggtctccgaattggtgaagccgaacataagcccgccaaagccgatcaccgacaggcacaccgagaagaagtccgcgcgggccgaagggtcgtgtgaaccgaaattatgcagtccgaacatggccgccagcagcgagattacgccaatgatggtcatggtcaggaagatcgagcgccagccgttggcatcggtctgccagccgcccaaggtggggccgatggctggcgccacgctcatggccatgcccaccgtgcccatggcaaacccgcggcgagacagcgggtaaatggagaacacggtgatttgcagcaccggccacatcacgcctgtgccggcagcttcgagcacgcgcccgaccagcacccatacgaagtttggccccaaccatgccagcacggagccgattgtgaacaccgccatcgagcagatgacgatctgtcgggtggagaagcgccgggtcagaaacgcggtcagcggcaccatcacgcccatgaccagctggaacacggaggtgagccactgcccggtggttacggagatgtggaattcggaaacgataatcggcagcgcggaactcagctgcaactgcgtgaagttgcccacgaaggtaatgaaggtcaggattgcgatcgaaataaacgccgcatggctcagcttgccatcgacgtacgattcctcctggctcagcacccgctgcagttcgccgcgacgattcttgatcctgctctctccagccacgcacactctccacttccgttgcccggccggtggctctggcggtgtcggttggcatgttcggcactggtggtgcctgcggtacatgccggcatgctggtttcgtcttttcgtcttgtcgcataccgacgtgagggcaaatgtattcggcgaccgtcgctatttcctgtgcttggccgggcaacctgacaaaagcaccccaatacgctatacccaggggtggtccgggcggttgggcggctcagtaagggccgccaccagccgaattctaaaacaatctaaaacaatctaaaaggttctaaaaggcttcgggacaagtatgcgtatatcggtatggtgactttatcattctggcattctgagatgcatctcataaagtggatggtcactgcggtctgaaagtgagctttgtctgaatagctggtgtaggtcaaagggcctgcaagtggcatgtcgggagacccctccaacacggcaacgatgcgtatgcaacgtatataaggtatccccccgtaataatggggccgataacatcccacatattccgccaattgctttctttgcctgcaattacgtcggtgagacatgtttctgagacgtttcttcgaaatggtgcaattcttcacgggggggtagcctctattatgttgcataaagggggcaaccccttatagtggttttcttggtgaatgccgagtcagatccggtcaccggtctgattgcgccatagggcacgagggaaatccataactgtggttcaaggggcagaggaagaaaggggtatccgattggtatcacgaaataacggcaccgcgtctatcggcgctggtgcggtcgttggcacaaatgagacgtctcaccgtgccgaaggtaacacggtacccgcgggtgctccccatacgcagaaacagatgagcgatctacgtcagcatcagctttcccatgtgctatattggcgttttttcgttaacctcgctctaatgctcatggacgcagctatgttcctcatcgcgagcgctaccgtactgaacctgcgccacgagaaccatccgttctacacgccccgcttcggttttacttttgatactactgtctacttgattgtcgccacctgcttttggatttggtcgctgcatcaagtcggcgtctatcaccgccacattatgggcgatggctaccagctcaacctgctactgattaaaggcatggccgtctgctggataatccagtgcgccttccatttcttctttaagtttgagttgacgcttaccgcattatgtctaatggtcgcatctggatgggcgttgactgtcgtagaacgtatgatttcacgcgcgttcttgacccgtagccgtaagaaaggcgagtatgcctatggcacggtgatcgtcggctcgcctcagggcatcggacgaatgcttcggttcctggcgcagcgacaacagctgaactacaggccggtggctgtttgcccgattcggttgaatcccgagactgggcttgtagattccgatttgaatgccgaggaacttcgacgtgaaatcaatgagaattgggggagctcccttccggttctccaatacagcgacaataacttagcggaacagttccttgatattaatgcgcaaacagttatggtgacggatgttttgcgtcgatactctgataattacaacacattctctgtacgtatggaatcgttggatttggagatcgcgatggttgcttcggctgcagatacgtccaatcacgaaattcaaattcgatccattcaaggtaccacgattattacgcagcgtttacctcaatattctgtgatggccaggttccgtaaacgcctttttgatattattgtttcagcaatcgcgattgtggctgcttctcctatcatgttcgtcactgcaatacttattaaagctgatgacggtggtccggtattttataagcagcagcgtattgggctacgcggtaagcctttctatattcataaattccgttcgatgcgtgtgaatgcagataaatatcttgccgaagttgctgcggccaatggtcaggaattaggaatgcgtgtgaaaattaaaaaggatccgcgtatcaccaagattggtcattttattcgcaagacatccatcgatgagttgcctcaattctttgattcattcattggtacgatgtctgttgtcggaccacgtccgcagcgacaatttgaagtagatgaatataatcaggttttcgccacacgtctactggttaagcctggtatcactggcccgtggcaggtttcagggcgaaatgatttgtccgacgaagaatctgaggctttggacgttgcctatgtgcagaattggtccgttatgggggatcttatttatattctccgtactgtcggcacagtcctccaccccaatggcgcgtactgagtgaactcatgtgtatttactcagttgcttcagattgaaaaggttatgaaccatgtcagacgattcgatgcatgattcttcagaatcactggagaagccgcgacgagatgaggaagaactaagtaatgcatctttggatgcagatgatgttgataatgcattgccattagtgtctcctcatgtagatccagaggtattggctgatgacgctaaggaggctgaacgccgcaagcaccgtcgtcgtatgagtccggaacatgtgaggcgaatcaagcgtaaaaagcggattcgggttatctgcatcgtaataggagctctgctgcttgttattgcttcacttgttgcctggcttagcatatctgcaatacgagcaaagaacgaggtgtcggcagctattgtttctgctggacaggttcaatcccagatagaatccggggaaacacagaaagcaaaaattagcatcgagcagttttcgcagcatattgataaaacttatgctcagaccaaacagccaatttggggattagccgagtttattccgtactacgggtctgatgtaaaagctgcaaggaaagcggtccgagttttggaggatgtgtccaacaatgctcttccaaaattggcagattcagtggagtctcttgacttcagccatatcggttttgccaatggaaccattcaactgggcaatttggaatcaatagccccagatcttactgcggctaatgaattcgtagcggacgccaatattcagctgaacaatattggtgatacgcatattcctcagctaactgaagcacttgctaaagggaaaacgaaacttgcgcaactggccgatctgaccgatatggttagtcgaatagccgatgtgctgcctagcatgcttaatgtaaactctactgggggcaaagcgagaacatatcttgttttagctcagaataatgccgagttacgggctaccggtggtattcccgcttcttggggaacccttactgtagataaagggaaaatgagcataggtgcattcgaagcgcctccggcggatggacagtttactgaagaggagtctatcagtgctcttactgcggatgaacgaaatctcttttccctaaagatggcaactgattatcgggacattaatttcactcctgactttcctcgcactgcagaattagcgagtcaaatgtggagtcgttccgattctgggactgttgatggcgtacttagcgtagatccggtgttcttgcaacagttactgaaagtaactggatctgtgacactgaccgatggcactgtgcttaccggtgataatgctgcgcagattctcttgaaccagacttatatagataagccgacggaaaaagagcagaatgttttcttcaccatggctgctacgcaggtatttaaccatgcgctaaccaaccttgatgggaagaacgagcaattgattgctatgttccgcaaagcaattgaagaatcccacgtatatgtatggagctcgcacgaagacgagcagcagcgtatcgaaggcacggttatatcgggagccctacagtctctgcctgctcaacctgtgactggggtgtacttcaatgacggcacgatgagcaaaatggactggtatctaaagcgtgaggtgaccagtacctacgacaagacgtatcccagcggtgccaaacaatacaccattcatgtcaaattgactaatactgccgataagacgcaagtgaatgcagctcctgattatttgcgtggattcaatgtcaatggatcccctcgtcatggagaaatagagacgattctatatatttatgcccccgatgagggaagactggttgattggacgcaggatttcgaccagattaccacccatgatcagctgacagtaggggtgaaagccgtgactctgcagccgggggaaagctttgagacgacgattcatgttttgacaagccctatggtcggagagaatgcaatgattttgagacagacccccttaattcagtagaggggtaaccccttatgtctaaagtgaagaaacaattgcgtggaagaacggagaagaaccgtgaatggaatcggacaagtacagaatgatggcattacgttgctcgacctgctgaaagcggtcaaaaagcacgccattactgcggtaattacgcttgttgccatcttagttgcggtggccgcttttacatttcttagtacaccaaagtacacggctacttctgaattattggctacgtaccgtagctcatccggagctgctggttcgggcacaagcagcattgccggtgaattaagttcaggtgctagctacatcaacagccagattcaaacttatccgcaattggtcaaaacagaatctgtactgcagccagtagtcgatgatttgggcttgaaaaccaccgttaaggaattggcaacgaccgttacggcctccaatccgagcgacaccatgttggtagacatctctgtggagaacgtagatccaaaggttgcatcgagtattgctaatgcggttgccgagagtcttaagaaacaagttacttccaccatctactcggatgagggagacaagatagtttctcccgtcaatcttgcagtagtgcagcaggcatatgcgccggccacaccgagttcgccgaatgtgaagctgaatttggcggtgggcatcgtaggcggtgtgattctgggtgtcatcgcagcgttgatcaaggacttgatggatactcgtgtacggcaggattccgatattgctgccatcaccgatgcgcctatgctgggtagtctgactcgcaatgactccttcggtgaaagcactcctgtgattattgcgcatccggcatccagggaagctgaggaagtacgtcgtttacgtactaatctttcctttgttttgcctgatgaacatctcgcaaatgttattgtcgtaacttctaccggtccatccgaaggtaaaactacggtgagcgtgaatctggccactgcattcgcggaatcaggtcacaaggttctgcttattgatgccgatgtgcgtaacccctcggttagtaaaaagattggaattgaaggtactgttggtctgactcatttgataacgaatcaagtatcttcgcgagattctatccagcgttattggaaacccaatttccatgtattacctgcaggaaagcagagtatgaatcccagcattctgctgaattctcgtgccatgaaggcattagtggaacaggtcgccgaatcatatgattatgtgtttatagataccgctcctatgcaggtctctaacgatgccgcaatcttcgccaaggatggcccgtccttgctgttggtggccggcctaggggctgctgagaagaaactattccgccagactgtcagcgagctggatactctggatatccacccggtcggagtggcaacgaattatactgagcctgaaaagtcccacagtaatacgtactactattacggcgaagacaacggtaagggcaattacaagcacaagcgtcagggcaaaactgctgacgagacccaaaagtgatttgccatgactgtgttcctgccatatagcgtattgatgagtgtgtatgcccgggagtctgccgcattcctcacgatgtcattaaatagtatgatggcccagagcatacctccacaggagatagtgcttgtggaagatggcctgattacgtcagaattgaatgaatcgataacgaattttgatgaggcatatcctggtctactcaccgtggtttcatactccaaaaatcaaggtctggggtatgcgctaagccgtggacttcctgtatgccgtaacgagattgtggctcgtatggattcagatgattatgcgtttccaacccgtatggaagagcagcttgcgctgatggaagagcgtgacctagacatggtcggttcgcagattgtggagttcgtgaaagacccggaacatccggtggctgcctccacgcttccggtgtcttcggatgaaattgttgcttattcgaagaagcgcaatcctttccgccacccctcaatggtgttcaaaaagagcaaggccatggaagcaggaaactacagtggtgaattcctgtatttcgaggactgggatttgttcaatcgaatgcttgctatcggatgcaaggcatggaatattgaccatccactggtggccatgcgcgtgagcgccgacttctatggccgccgtggtggaccggcctatctgccgcatatttggaagttcaagactgcacagctcaaacgcggatatttcacctttggtgagttcctagtctccaccgtgcctcatgtggcggtgtgcttggtccccaattcggtacgttcattcatctatacgcatcttttgagaaaaggagccaaacaatgacagccaccgataacagcaatccgactgttgcagtcgtaactctgcataattccccgaactatggctcttgtttgcagacctatgccacgcagaaagtgcttgctagcgtgggagcatccccgaccatcgtggattattaccgtgcggatgccattccggctaacgagaccgatcgcgcattgaacggtcaggtggccaaaaaaatgcccatctttaagattcctggcgttaaggcgttggcgcgtatcccggtgagccgcatggtcaagcgacgcgcggctcctctgaatgcgttccgtcacagcaagctgaacctgaccccgcgcccgtactattccattgacgagctggaacaggatccccccaaagcggatatctactgcaccggtagcgatcaggtgtggaacagcttgtggaacaagggatttgaaaaggcattctacttgacatttgcgccggaaggcgcgaagcgcatcgcatacgctgccagcatcggcaagtctaagctcgacgattgggagattgaaccgatgcgtgaggagctgtcgaagtactcacatatctccgtgcgagaagctgaagcggctgatctactggattccatcggtgtacatggcgcagttcctgtaatcgatccgacgctgatgctcacacaggatgattgggctgagctgcacagcgacgatgtgccgaaagagccgttcattctgatttaccagcttaatcgcaatcatgaattcgatgagtatgccaagcgcttgtctgagaagcttggcctgcctctctaccgcattgcatatggcgtgaatgagcgccgtgcaggcgtgcacaccattgtgtgccccacagtggaacagtttgtttcgttgttcatgagtgctgaatatgtggtcaccgactcgttccatggaactgctttttcgatgaatctatcgaagaagtttgtttcgattagcccgggccgtttcagtgggcgcatcatgaacctgctggaaatgaccggtgaaaccggccagtacctgcaagactatcgagatttgagcgtggtcgataatccgatcgattaccaacacgtgcatcaggtatttgaggccaagcgtcaggaggcgctcgacttcctcaataatgctatccacgactaggaaattaggcttttcaggagtgaaaccatgaatccggctactaagcagtatttgaaagagtacgggcccgtacgtctggtcgccctataccgtctttttgccaacagctatccagcattgcgtcactcggcgctcaagcaggcaaggcgttttgaacataattattcaaaaccgtcctcaaaaggggcagatcaggttcgagctcgcctgattttctatacacatcagattgaaaaaggcctgagccacacgcatttccgatatggtttcggcaagcgaccgttagcttcgcttgcccaaaaaatggaaatgtaccgtaaggttgttcccgattatctttcggaccaaagctattgcagtgctttagctgcacttcatgaatatgtcgttcgccatgatgggcacaaagaagctcttcaatacgtgaaagggctttttgcagaaggaacctggctcgagattcaggctcagcaatctaatctgggtggcagcactgtaatcgaacggagctcaaaggctaataatgcaaatcttccattcaaagaattagccgagaatcgccattccattcgtgagtatgctgaccagccagtgacctacgaggaattgcttccagcaattcaactggcaatgcgaactccaactgtatgcaaccgtcaaccggctcgcttgcgtatcattctcaatccggaattgattacaaaagcattgaacatacaaggtggattcaacggatacaagattccaccggttttactgcttattaccgcggacaatactgcgttcatggcaccccaagaacgaaacgagggatttaccgacgggggtttgttcggtatgtcactgctgctttccttggaacgagaaggattagctgcatgtccgttgaacaccatgatgaaagagggacccgaaaaggcaacaagaaaactgctaaacatcccagatcaagaaaatatggtgatgtacattgcggtcggacatttccccgatacagttaaaacctgtgtatcgcatcgttttaacgctgaagatattttgaaagtacttcaatagataggcggttgattatgtctaaacctatccgagtgcttcaagttgttccatccttgaaccgtgcagcaggagtagctcgtttcgcctacaacatggatctctatcacgatgaggaccgcgtacatttcgattacttacatcactcaagtattgacggtctattgatgcacgacaagacatatgacaaagaattacaagaaaaaggttctcgagtatatcttgtcaactatgccagccgaggattatctcgctttattgaagaggtgaatacgttctttgaggagcatggttctgaatacgacattgtgcattgccaaatgccaaactcggcgttctgcgttttacgtgacgcgaaacatgccggagtgaagcacagaattttgcatagccatctgaacaatagctcggatcaattcttgcaccggttgcgtaatgctccattgaatgccatcggtaagatgtacgccacggataggctggcctgttctgaagatgcaggtaaattcttattcggaagtgagccatttaccgtgattcgcaacggaattccgattgagcagttcgcttatgacgctggtataaacagtgaattgcgtgctgagtacggtatttcgatggacgctcctgtaattggttgtgtgggccgcatggtcaagcagaagaattatccgtttgccgtgaaggtgtttgcgcaattcttgcgcaaacgtcctgataccaagttggtattcatcggagatggaactgatcgcgctgaactggagcaatcgatacatgacgaaggtgtgaccagttctgtgctgctgcttggtgtacgcgaagatatcaacaggctgtattccatgctggacgtgttcttcatgccatcgctgtatgagggtctaccggtatcttgtgtggaggcgcaggccagtggtctaccttgcgtgtattccaccgacgtgccgcacgagtccgacatcacgcagaccggtctatttgttgatcgaacggcggatatctcgcaatgggttactgctctagagcgggccatgaatggcggacgtctaaccggtaatcctgaagtgctgtccgcgcgtggctattccgcttcagctaatgctgaacagctgatgcggtattatgagcagttgatgggtgcagcagatgaatagagtagcagaaagacaacaaataacaggcgcgaagagggtaggctttaatcggaataccaacatctcgttggttgtttgggcgattgcatcagctccattttgtgtactgtttactggagagaattcattcacttttcaaactgcaattccttccattgcattgatggctttagcgttaattttttctaatggagcaaggcagtattctcgtcatgcttttgtaattgccatagggtttatcggcgtcattggtatttctgaaatattagcagtttgcaccaatagctatatgttgacgaataagacattgatgagagcattgatgtttattgtgattgtatggttttatgccactgcggtatcgcataactatacatcatatgaaataaaaatattaatgcagctggtaggattatcagtttgtgtttctgctttcctcgagtttaaagaatatctggctcagggaatgtactccggacgcgtgtaccccgttagtttgcgagggcaaatgattgatgctaatttctttgccttgctcgttgtgattcaggttgcgtgttgtttcgttgttgcattatatagcaatgtaatattaaaaaaagttatatattttgcattatctggtattggtataatatcaattattctcacgggatcgaggagtggtttgttatgtgtcgccctcatcatggtactcggtggaatggtatatgtggttcgccctgtcaaaggaaagatgtccagcgttatattccttgctgggttcagtgtggctctattaattgctgcatctaagtacattagtgactggatgtttaatagattctttgtaaatagttataacgatggttcgaatgaatttcgtgtcacactgtggatcaaggcagtggagcgctggcctcaacatcctctttttggctttggagtaggaaattataactattattcggcacaggattggggactggccgagacgtcgactacgacgcatggaacagttactgattttcttgtcgattttggcattattggtcttggactgtttttatatatagtgattgatattatctctggattgattgttagtaagcaatatgtgctcctagctatgctacctggcattataatttgttctgtcataattggtgcagaacgtactgttgctctatggctgtatcttattgtgttttatgtggtcggtcatttctgcaagaagaattctggtatatctctatatgacgtattcagagaaaagccagctacttaaattgttggattatcacaaatagaatgatctctactgctgtagatacatctattcgattgctaagatacacagaggtttttcaatatgaagattgttgatcgccttatatgtaagacgcgtgaaaagaccaatccgtggtttgccgaatatagaaggaatcgtttaaaccgtaccgatttctctataatatctaataattgttgggctggttctgtctatcgatattttggattgcaatattcaagtccgactgaaggattgtatttcttcccggaggattacattaagtttgtgagcaggttacggcactacttgacaagcgacattcaattcattgaagcacgtgactcgaggcattctcatgagcttgccgaaaaaggggagatgtcggttcccgttggagtcattgatgatattgaagttatcttccttcactatccgacatcggaggaggccaaggagaaatggattcgacggtcagccagagttaattgggacaatctgttcatcaaattcagccagatgaatgggtgcagccaagacgcgctccagcaatttgatgatcttccgtttgccaacaaaatctgctttactgcatctttaatgcctcaactgaaatgtgctagtttctttaagggatttgaggattcgtctcagggcatattgaatgacactgaccgatttgacaagagcttcaaccttactaggtggcttaatcgtgagccggttccatacgagctcggatagattactctcctctgattttacttgttgagttaggatatgggatgaaatcaagctataagcagctcctttctgacacagtcgttttcggtgtgggtaatgcactgatgaagcttgttcagttttgtttgatgcctatttatacggcatacatgacgactgaacaatatggtgttggtgagctaatcaataatcttaatgaattgttgtatcctctggcttgcttggctatttatgatgcggttttccgttttgccttggacgatgatggacaaaagaagagtgtgctttcctcgggcttggccctgactgtaatatcattgcccatagtgttggtagctgcgtctatatcttttttcgttttccattttcaatatgcgtggctacttgccctgatgtgtttcaccgccggtgttcgttacgtttgtgttcatttcacgcgagggattaaccggcccttattatttgctggcgcaggcgtatttggatcgttggttatatttgcgtgcgcagtactgttcctgtccgttcttcatctcggaattacagggtaccttttgtcatttgctttggctcatattcttacaacaatattcgttgtaattcgaggaaaactatataagtatttttcattcagtgagatatcaaaaaatgaaatacaacttatggttcgttatagtatcccgatgattcctaatggaatgacatggagtgcggttaatttcatagacaggtatgccatcctcattgtttgtggtgcaagtactgctggcctctttactgcagctggaaaactgccggcagtaataaatatgatttcgatgatcgcgcaacagtcgttgcagatttttgctgctaaagaaatcaaatctgaaaacaagaataaatcattctctactgtgttttctgcatactcaatactgatgctactcatgggatcgtttgtcattgcgattacagaattactctccaaggttcttttaaagggaggtttttacgaggctagtaaatacgtgcctcttcttcttgtcgttgccctaataagtaattattcagcatatttcgcgatgttctataatgcaattaaagacacaaaaatgattctaataacaactgttattggagctttggtcaatattgtgttcgcaatcgcacttgttattccgtttggtgcttggggtgtcattgcgtcttctgtcatcgcttatctaaccatgatgatgatgcgttatattaatacgcgacatatcgttcatacgaacctagatattcagtatcatattgttgctgttgttattatagtaattcaggttattattttgtcgatgcagatagattatgctactgttctgtcaattattctgttgattgttttgttgatttatacgggtgttcgttatcgtttgacaattgctaaactatataaaaagatattccgatagcatgtattactgtgaatggggcttctggtcgtcactggccgtcggctgttcgcgtggtctcgacgcatgttgttgagaccggcactgatgatgatggcgttgtgaatgatatgatccatgatcgcgtcgcggtgcggtctctgagccgttggtgtcggttcttgatgaggtattgtgtacggggcactgcgttgatgatgtcgttccggttcttcattacctcgaggagaagcgaacgtacactttcgctaggcctgacgaatgtggttcacccaatacgaataacgtgtatgcgttgtatattcttccaagtcaaatcgggcataatttcgcgtggtgccatcgttcgccggctgatgataattatgccattgtctgccacgcaaaatcatcaaccatacctcagggcatgcagttaaccatactccgagacctatctcaactatccattaaaaactaaacaatgtaactgcgctagtgttgacactgtcgacgtcttttttgacagattatcgtgtacagttttgttctgatgtcacaatggaatgcaatgatgccgttttatatatgccccagataaataggggaagagcataaaaggcatatccctcaaactgtatatacaaatatgttacgagaataaaccagcagacagcttttttattccatgcgtcatttatgctgatatgaataattactagcatgatgaaaataataaatgccagtattccgaattcagtgataaagctagtgtacccactcatcgtgaattggttatacgtaggggtattaaggttgttgatttcccacgagttccttccgcctatggcattccaattttgatgggcggacttgaaatgagcgttgaccacagtgggtatgttgccggcgccgaatccaatgaggaatcgcgggacatcgctggcccaggctcgcgcaagaacaaatgcatgaaatattcgagcagacatagaaccatctccgccgatgagaccatgatggatgatgttggctgcacgttcgttgaatgaaagcacaagagctgttgctgctattagagacgctgcgccgccgattgtgattaagcgattacgacgcgaattgaacttgatgtggggcaatgaccatagtacacatgcaatcgcagaatctatgatgatacgtagtccagaacccatcaaaaaagctccgataacaaaggtgaacactagtgttcgtaatcgtttgtttttagtcatccaatatgtcggtagtaaaacaccgaatacatgcataccgatgtatgaaggttctgcgaataagaattgaggcctgttgtagggacgcaacataagatgagcaaaatacgagcgcaagctatggatatcgagtcttaaggcaagaaattcgatcactccaaccacgaatgcaacccaatatgctgcaccaatgattgatgcggcaaagctggtactcagtttcttaatgctaaaggcgatatgcagtgacaagaggcatgacaggaatccgagaatgcccagagctgtagtgatcgtagtaatcaatcggaagtggtaagtagaccaagcaaaagcggacaaggggagtagcaccgtaatcgggaataacataaagccgaggtatggtcgtgctgctgtatgtaaaagacgccagttgagacagacatagcagaggaacagaattggcgagattggcgaccagtaaggcattcggatgccgattaccgtaccatctaccggcaatagagccaacgccgcgtaaaatatatagtcatatttgtcaatgatgataaggcggggagcaagtgctgtatcagttggagatatcatgttcattatctctgaaccctctgaggcgtctttcactgtgagtaaaagagacctcttgcttcgcgagttgttactggttcggagtccgagcataccccctatcatgtacctctttgcggactatgagtgctttgcgagtcctatatgacggggttgtatttctatggggagcatgtagtggaatttaccgagcaggttcgcccgcttattttgtgatgagttgggttgtgtctgttcaatagaaagtgagccgtgcgaggtggtgccgttttcttggactgtgatccgaggaggaaacggccatggcgaagtacagcaaggagcagcgtcggtgtgcggttgagttgtatgtgcggtacgagtgctgcgctgcggatgtgatccgcgagctgggttatcccagtcgggaggcgttgcgcatgtggcatcgcgactggctcgaggaacagaggacggggatgccgtcgattcgtggggagcggtatgcgcgctacacggcggagcagaagcgcgccgcggtggaccattatctgacgcacgggcggcggacgagccgcacgatccgccggttggggtgtgttttgtcaagttggagtaggccgtttcggcgtttcttttagtccatgtgagcggcgggtttcaggccgtttcggcgttggccggtcctgctggttgttggttattgcattggttattgcatgagggcgtgggtcttgcgccaggattcgccctcgaagcggatcatccgtccgtggtggacggtgcggtcgatgatcgcggcggccatgttggggtcgccgaagatcctgccccatccgctgaactcgatgttggtggtgtagatgatgctctgggtctcgtacgcgttggtgacgacctggaacaggagcctgctgccgtcctcgtcgatgggcacgtagccgagttcgtcgatgacgagcagcggggtcctgccgatcgcggcgagttcccggtcgagccggttgtccgattgggccctgaggagccgcatgaccaggcctgcggcggtgaagtagcgtgcgggtatgcccttgcggcatgcgttcctgccgagcgcgatggcgaggtgggtcttgccggtgccgggagggccgaacaggacgaggtcgtcgtggccggcgatgaagtcgagggtcgtgatctgcccgcgcccgtagtcgacggggaagcggatcggggtccagtcgtagccgccgagctccttgtcggcggggaatccggcggccttgagcaggcgtgagcgtttggagcgttccctggattcgatctcggcgttcatccacgattccatgaattccatctggctgggggtcgcgtccgcgagctggtcggcgaggacctggcgggtcagaggcagccgtctggccagggtcatgatcgttgcgattctttcgccggtggacgcgcgcctgcgtttcatgtcgggcatgacgaccggcggacggtgggttcccatggtcaggcctccttcctttcccatggctgtcggggtttcatgaacacgtcgtatccggtcaggtcgggtaccgactgctcgtacggtgttttgcttcaatgtttgttcgacaggttcggcagtgtttttccgcagtgtgggctgatggttttccccggtgccgtcatcgtttcccggtgatgtgagaggcatcggtgccgccgcctgtatattcccgagttgccaatcggttttgattcggccggttgccgccggccggcgctcgggaaggaaaggaacatggcgataccgatgcccattgtgcaagatatcaggagactcgaccggcagggaatgtcgcgcgcgcagatagcgcgtcgtctgcatgtggatcgcgggacggtcgcgaagtacgcggatatggaggattgctcgcccaagccgaaggcggatcgcaggtacgggtcgaagatcgacccgtacgcgcatctggtggacgggtggctggaggccgatcgtctgctgcccaggaagcagcggcacacgatcaggcgcgtgcacgaccgtctgctggcggagacggactacgacggcgagtattcgaccacgatgcgttacgtgcaccggtggcgcgaggcgaaccgcggcgtgccggatcgcgaggggtacgtgcggctcgagtgggcggcgggcagcatgcaggtcgatttcggcgtggcccgggcccggatcgctggcgagatggcggacgtgcattgcctggtggtctcgttgccgtattcgaacatgcggttgtgcgtggcgttgccgggcgagaacgcggagtgtctgtgccatggcctgatgctcgtgttcgagcatatcgggggtgttcctcccgtgatcgtgatggacaacgcgaccggtgccggccggcgcaacgcgaagggcgaggtcgcgttgaccggggtgttctccgcgttcgtggcgcattaccggctcgaggtccggttctgcaacccgtattcgggcaacgagaagggcagcgtggagaacgcggtcgggtttttgcggcgcaatctcatggtgccgcccatgcgcgcggaatcgtacgggcagttgagccgtctcctgctggagcggtgcgacgggctcgccagggactcgtattgcccgaggttgccggacgtgcccgtggccgaggtgttcgacgaggagagggccgcgttgatgccgttgccgtccacggcgttcgacccggttcgctgggaaagccggacggccgacaagtacgggctggtcgacatcgactcgaaccggtacctcgccggccccgattcggcgcgttccaaggtgccggccgcgatccggtgggacacggtcacgctcgcatcgcccgccaccggcgagctcctcgcggaatatcccagacagtacggactgtttgtgttcaattagttgttgcgggtttagtcacgatgatttttcgggtttaggcagagcatgccgaccacggaatggtcttaactggatggtgcttgtatctccgccagaaaggaccggaaaggattatgatcagcatgccccaagtacagtctatccgtcgtttgcggcggaacggggaatccgtcgcgtcgatcgcgcggaaaacacatgtcagcgagccgacggtgcgtaagtacctcgcgaaggaggatctgtcggccgtgccgtcggtgagaaagccgcgcgcgtcggtgatcgacccgtatctgcccgtgatcgagcagtggctcgcggaggatcgcgcgaactggcgcaagcagcggcataccgcgaccaggatctgggagcggttgagggacgagcatggcgcggaggtctccctgtccacggtgacgcgggcggtggcgcggctcaggcgtgagttcgcggcggagcgtgatgaggcgttcatggatctggtatggcatccaggcgaggcgcaggccgatttcggcgaggtcgacgtgctgttgcgcggcgtggtgcagcggatgcatcatttcgtgcttgatttcccgtattcgaacgtcggtctggtgcagttgatgccgggcgagaacgctgagtgcacgtgcctggcgttgcgcaacctgttcgagtggctgggcggtgtgccggagcggatcgtgttcgataacgccgccggcgtgggccataaggggtacggggagcgcgagccgcgcctgacgcacctgttccaggccttccaggcgcattacgggttcgattgttcgttctgcaacccgtattccggtcatgagaagggcgcggtggagtccaaggtcggcatggtgcggcgcaagctgttcgtgccccggccgagcgtatggagcctggagaactttaacgccgggctgccggaccggtgcctggagctggccacgaaaccgcattaccgcaaggacacggaggaacgtggcctgttctccgaggaccgtgcggcgctgctgccgttgcccgggaagcgtttcgacgtggtcacgtggcggcatatgaaggccgaccggtacggcgtggtcacgctcgagggacggcatcgttattccgcggaccgggcgaacgcgggcagaggggtgatcgtgggcctccgcgcgctcgaggtcgaggtcctcgactcgtcgggcaagcatctggcgacccatcctcgggcgtacggccaggccagcacgaacagcgaggacccgtccatgcagttggcgctgctgtgcaacaagcccgcgtcctggcccaacagccgggtacgtgacgcgttgccggacccgttgcgggaatggctggatcggcaggacagacagacacgcaacgaggcgctgcagaccctcaaacgcgttgacagggaatccgggtgggcgaacgcggtcgaggcgatgctttccatcctcgaatcgaccggcggggcggaccgcgccggtgtcacactgctcgcggccaggctcgccgagggcgtggcgggtatcgaatacgacgatgacaggccggatctgagtgaatacgacatcgcgttcaccgcggacgtcggcgtgcaggaaggcgggcgatgaacacgaagacggacgaagggctctacgagaaggcccgcaagctgttcatctccaaggcgagcatcgacgaattcgccggctgggccacgccccgccaggtcgacgccgtccaccgcctgctcgacacggaactggcgaacagggaacgcgcgaagcacgacaggctcctgcgccgcgcccggttccccgtcgtcaagggtctcgacggctacgacttcacgaacgtcaggctccccgacggctacatgctcgatgagctcctagggctcggtttcatcccgcgcgcgcaggacctggtgttctacggcaagaccgggcgcggaaagacacatctcgcgatcgggctgggcatgaaggcgatcgacatggggctgggcgtgcggttccatcagaccgccgagctcgtcctccagctgggcaaggccaaacgcgacggcacgctcgagacgatgctccgggacatcggccgtgccgacctgatcatactggacgagttcggctacgtacccttcgacatcgacggggcgcgcctgctctaccggatcatcgcgggcagctacgaaagacggagcatcatattcaccacgaacatcgagttcagtaaatggggcacggtcttcgcggacgacaaactcgccgcagcgatcatcgaccgcatcgtgcaccacgggcggctcctcgagttcaccggccagagccgccgcgtcagtgaggccctcatgttcggcaggaacacctccgcgcaaccggaaaaataaggaaaatgcatgcaactgcctaaacccgaaaaaaatacatgactaaacacgaaacaccgacttgacgaaatacaacggacggtcgcgcaatgtggaggatcccgcgctcgtgcttccccggctcgcggtcaaaccccgcgcgtggcgggaaagctcgatccgcccggacgtgcccgacgatatacgcgcgtggcttgattccatggacgaaaagacgttgagggagagcctcaaagcgatcggggacgcgtgccgggcggccgggttcgatcccgcgatgcaggcgtgcggcgagatcctgcgctcgaacagggacatgggcctgcacgcggacacgctcacccctatcgcgttgcgcatgcgcgacggcgagtgggaataccccggcgggatcgaggagcccgacctgagcggctacgaccggttcatcaccggcacggacgacggaggggaagaacggtgagcgtcagacccgatccggtgatcccggagacccgacgcaggcgcgcgtccacgaccgagaaaagcgaacgcatcctgaagatgagccgcagcctgaccctgacacgcagcgtgctcgccggcacgctcgccgaggccacgcccaaccagctcgacttcatcgaacgatggttcacggccgaactcgactcgcgcgagcgatccaaacgcctgcgcctgctcaaacaggccggcttccccgccgacaagaccctcgacggctatgactggaccaacctgaagatgcccgccgactgggggcgcgcgcagctcgagaacctcgacttcgtcgccggatgcgaggacctcgtgctctacgggcccgtcggcaccggcaagagccacctggccatcgcgatcggacggctcgcctgcgagcggggcgtcccggtgcgcttcttcaccgcgaccggactgctcatgcgtctgcgccgcgcccagcaggagaaccggctcgaccgggaactcgcgagcatcggcaaggcccgacttctcatcatcgacgagttcggctacctgcccatagacgaggagggcagcaggctcctcttccagatcatttccgattcctacgagacaaggagcatcatctacaccaccaacatcgaattcagcggatggggacgcgtgctcggcgacaagaacatggccgccgccctcatcgaccgcaccgtccaccacggacggctcatcagattcgagggccgctcctaccgaagcgaacacgccctcatgaccaaataaccaacacaacgcagacaggcagcggccgataccgcacaccctgcggaaaacccgctgcctacactgcggaaaaacaccgctcacaaagcggacgccaacttgctaaaacacactcgtacggcttctcgccggcggcgatgcgccgggccatggtggtcacactggcctcgtcgatcgcgtgcccctgttcgaccaggtgctctccggcccggacggcggcctcgaagccggacgcggcgctggccttggcgatgacgcggaacgtggtcctgcgtgtcttggcgtccatgcggtcgatggcgatcctgagtttgtcggggaaatcgtcacggatggtggaatcggtccatgcgtgggtcttgcggctcaacgcgggcaggagcgtggcggggttgcgcaccgtggccggcgaatccccgtacacgcgcggcagtctggcacaggtgcgtccgtcctgggtgcggatcgtcacgtcgaacgcgcgcagacccacgtcgagagtccagccgcgccacgaggggccggcgaggtagtagttgccgtcgatctgcacacgcccgtccttgtcggccttcctcacctcccaacggatcgcgtcgtacggcttggcgggaagcggctgcatatccatcttctcaccggcgaacaggccgccgatcggcgcgcccttgcggtaatgcgtctccttggccatcgcgtcgcaacgctccagcatgtaccgggtcagttggccgtgggactctgcgttgagcatgggcaccatgatgttgcggcgcaggaacccgaccgcgttctccacgctgcccttctcgttgcccgagttcgggttgcagaacctggtctccagccggtaatgctccacgaacagttcgaacacgtgcacgacggtgaccttgtcccacgcgatccgatggccggcgccggtggcgttgtcaagcaccagcgtcagggggaccgcgcctatgtgctcgaacaccgtgcgcagccccgcgcacacgcattcggcgttctccccgggcagggccacgcagtagcgcatgttcgaatacgggaacgtgacgaccaggcaatgcacgtcgacccggtccccgccgaccacggcctgcgccatgccgaaatcgacctgcgcctcgcccggatgccacttgagctccagatacccgtccgacgggaggcgatgctcctcgcgccaccgtttcacgtaccgctgcaccggcgaatacgagccctcgtagcccttctccgacacgagtctgtcgtacacgcgcttggcggtgtgccgctgcttgcggggcatgaaccggtccgcctgcagccacccgtccaccgtcgccctgaacggatcgagcttcgacggccgcgatacggagcgctccggtccgggagagcaatcctccctcccggcgtacttcgcgaccgtgtcgcgggccacgcccacctctttcgcgatgctcctccatgacatgccatgcgcgtcaagcaccctgatacgttgttgtacggacaccggtaccgtcattcctttcctttcccgagaaaaccgaacggtttgactttcaactcgggaaactagtccaggcaggacgggccggtgttcgtttctcaccacacgctgaagtggaccagaacctgccgctcacatggaagacatccacacgctcacacggcccactttctattgaacagacacaggttggggtatccgagcaaggaggtgctggccgcgtggatcgacgagctcgcgccgggcgagcgccgtctgcgccatgggcccatacccgacggggtcaagcgcgaggccgtgcccggggtcgcctccggcgagatgacgtcgcgcgaggcggcggaggaactgggcgtggattcatcggtcgtgagaaaccggagacggcagttgctcggcgagacgaaaggggccgcagcggcaaagggcgaaccggaacgcgaggatgccgctccgcagacggatccggatgcgctgcgcggcgagatttccgcgttgaacgccgacctggagcggttgcgcgccgaataccgggcgatggagatcaggctggcgatcatgagggggtcggcggaactggtgggaaaagagccgggcgcagacccggacaacctgacaagccgggaaaagacgatcccggtcagaaaggccggtgaggccctgggcgtcaacgccgagagtctgctgggcgaggtcggcatcgctcgcagtacctactactgccagcccagggccatgacccgccacgacaaggatggggccgctcgccctgatacgcgacgtgttcgagaacggcaaacgccgctacgggtacaagcgcgtgcacctcgagctcagaagcgcgggcatcgtcgtctccgcgaaacgcgtcatgcgcctgatgacggcccatgggctcgtgcccgtgtccgagagcgcgaagcgctacagctcctacaaaggcgagatcggcggcgcgccggccaatctcgtgaaccgggacttccacgccgcgaacccgaactggctgtgggtcacggacatcaccgagttcaggatcccggcgggcaaggtgtacctgtcgccggtcatcgactgccacgacggcatgccggtcgcctggacgatcggcacgagccccaacgccgcattggccaacgggatgctcgagtccgcgtgcgccacgctcaggcccggcgagacgccgatcatccactcggattaagccggttttgttgttaagccggggaacggttcggggtcttggtggctggccgtgtcccatgtggtttcccggcttaacgttccgggttatttgagggtgtgtagttgtcggagtcgttgctcgctgagccatgtctccttggaggggtcggggccggggttggccgcatcgacggctttgcgcatcatgtcgagggtcgcgaacgcgtagaacgcgctggttgtgctcatgctttcgtggccgagcagttgcatgatgagcggtagcggcacgccctgttggtagaggtccatggcgcgggtccggcggatcaggtggcagtggacgcgttcgggcatggacgggcacgtcccgcggcgtgctctggccgccgcggttttgaggatctcgtcgatccggtccacggagagcggctggatggcgccgttcctcgtcgagtggaacaacggcctgtcgccgtcgcgcatggacggtccgggatggaattcctcgaggtaggcggccaggtgggttcgtgtcctttctcccaggggcacgacccggctcttgccgcgtttgccggtgagcgtgaccctggccggcttatccatacccacgtccgcgatggtcagtgcggcgagttcgccgatcctggcggcggtgtcgtacatgaggatcaggagcatgcggttcctgcgcgatttggcgtcgccggtgccccatgcggtcagcaacgctttggtgtgctcctccccgaggtggtcgacgggtttgcgcgcgggtggtttgacacgtatgccggccgcgtcgttgcccagcgcggtcaatgccgggtgttcgaggcccgcgtggtcgaggaacacgcgcatcgtcgtcatcctcagcatgatggtgcggtccgagtacccgcgctcggtccgcatccattcgacccaccggcccaggcgcgcccggtcgaaatgcccgaaaccgatgtggctgcgctgcgtgccttccgtggtttcgagccatcggacgtaggattccaggccgatgcggtacgcctcgacggtcttcggcgagctgccccgcaccttgggcagccagtggtgcagccagtcgcgcgcgactcgccagaagtccggttcaccggagctggcggccgttttccttgccttgctcatggttcctccgtttccgggaccacgcgttcggcgtcggcgacgaggtccgcgtatccgtccatgaaatcggggctggcgtgcacgtagtagagggtgctgtcgatgccggcgtgtcccatgtaggccgccagatagggcagcatcgccatcacgtccacgccgtcgcgagtccaccgctcgatgttcgcgaacgcgaaccggtgccggaaatcatagggcctgggccgtttgccggcttgtggccactcgagcccggcccgcgtccagacgcggcggaacaccacgccgggcatgcccggggagaccggattgccggtggaggtgacgaagaacgcgggacggtcgtctccgaagcgttcgcgggaccgttggtcgcattccagcagttcggcggcgacctcgtcgcccacgggcagcctgcggctgcgaccggccttggaatcgaccacgtcgatggaacgggccttgtggtcgacgtgcccgacggcgagtctcctgacctctcgggtgcgcagcccgcagcaggccatgagcatgaagaacgcgcgagactgccacgcccacggcgacggagactccaacgttcccgcggcccgcaggaacagggcggcctcgcggtccgtcagcaggtacggcgtcggacgcggggatccggccttccactggtcggagagcacgtacgcgtcgggatcgtgggccagtcgcatccacctgccgaagtccctgatgtacgagaaccacgagcggcaacccccgggattcgcgtcgatcctatgggcgatccatcgctccacgacgccccgctccagacgcacggccccgtgttcgaggcaatgccggtcgaacgagcgcaggacctggacgcgggtggcgccatgcctgcccatggacgccttgaagcggatgtactcctccaattcgccggcgagcgggccgacgaatccgtgttccgtgggtctcatgacgatccgccttccggcacgggcagcacgcacgcgagcattcccccgcggtgcgtggccatgtagacgcgtgtggaatcggggtcggcgtggccaagcaccgcgctgatcgtcggcaacggcgtggccgcctccagcatcctcgtcgccgcgttgcgccgcaacagcctggaaccgccccggcgtccgagcccggcgtgccgcatgacacggctgatcgcctcgtacaccgatgaatgaccccgaagcgcgacatggggcgccttgtaccgcacgaacacacggtcgtcgtcggtggcgggcctttcgtccaacagccaggacgccagcctcgcggccagcggtcccgtcatcggcacggtcaacggattgcccgtctttcgctgcaccagacctatgctcatggaatcccaatccacgtcggcgatcctcagaccgatcacatcgcatgccctcagcccgcacgtcagcgacagcagggtgatcgccgcgtccctcgacggcaccgaccgcgaggcgcacgcctccagcaagcggcggtgctcgtcgtcgggcaacgttcccgcgatcgcgtgggtcctgcgtatgccggccaggccgatcgcgtccgccaggtcatcccgcccgagccatctgaacaacgggcgcaggtccgacgcggcgtgccgcatcgacgactccgaccagcgtgaacgcagcccggccaggaaccccagcacatgcgagccatccgaaccgtccaacgacacgaccccatgagattccagccacgtgaggaacaagcccgccatccgacggtaatgccccaccgtcgccgaagccagtcccgaaccggcgagatacgcctcccaacgctccatgaccacggccaaacccggaaccaccggctccgcaagcctgctcctgcgccacttgcccaggtccaccgaaccggaccgcagatacgagtcgcacaaacgcgccagcctgccgtaatcgaaccaccgctgcctgctgaaaccgcccgtccgctcactgaaggtcgacgcggcgaaccccgcgcccaacccacgcgtgtacaccgcatccgggcctccggcgtaccgttccaacgccctgatggacttgcggtactggcctatggtggattccatataaccggccccgtaaagcgcgcggaccacctcgcccgcgacatggccaaccgtcgtctcacccatggcaaactccttcgttcgaatcaaatgggacaagacgaacataacccggaacgttaagccgggaaaccacatgggacacggccagccaccaagaccccgaaccgttccccggcttaacaacaaacccggcttaatcggaattaaaccgacatcggtttaactccgaccgtggatgccactaccggtgggacgaatggatccgcatctgcaagagccacggcctgacgcggtcgatgagcgcgaagggctgcagtccggacaacgcggccgccgaggggttcctcggcaggctcaagcaggagttcttccacaagcgaagcttccaaggcgtctcgatcgacgagttcatcacgttgttggacgagtacatggtctggtacagggacaagcgcatcaaactcgaatacgggatgagcatcatggacaaacgcatccagctcgggctcgtcgcctgaacgttcgtgctatcgttgcgaacgaccattcagacaacgaagtccaacaaaacgtcaccgcccccaacccgaaaaaaatcagtgacgaaacacgaaacaccgacttgactaaatacacgccgcaacaccgccgcgctacgagtcgcaggccacccagatcctcgaacccggacagccggcccgggcggcgcaggccgcgctcaaccccgaacgccgcaaatacagccacctggcagataccgacgacgaccgcgaaatgtggagcctcatgtggaacatcatgttcgagaccggcatgagagaggccgaaagattcgccatcctgcccgaagagctcgccaccatcgacggcgtgcacggcatccagatcatgtgggagctccaacgcttcagatccgatgcagaagtgcccaactggctccgctcccgccattacgagggatgcttctggctcgtcgaaccgaaaagcaagcagggcaaccggttcgtgcccgtcagcaaccagacgtggctcggactctgggcgctcgtcggccgcaggcaatgccagcccggccatctcatattcacgcgcgagggacacccgctcaccaacaccgtcgaacgccgacgctggaaacgctctctcgaagacgccggattgccctacgtcaccatccgaagcgcccgccacttcttctccacgcacctcgccgaagccggagccccggaagacgcgagaaaagcgatgatgggccacgcaaaaatcagcacgacggccggatacacccactggtccgccgcgagcctcgcggcactcgccgacaaagcgcgggaggcagtgggcggtccggcttagcgaacgacagtaaataccagacaagaaaggccccgaattcctcccatcaggcgaatcggagctcttgcgtcttggcgtcagacgttctgcagatcgttgtatcgatgctcaaggccttcgcgcagcacttggctgtagttgattccctcgcgttcgccgaacgtgtcgagccatgcggggatggttacgttcttgcgtacgctttttttgccatatttttcagcgtatgcgtccatgtccaggctgatgagggtgacgatgccgtccggttcctccggtttcacgtcggcgatgttggtggcgtgcggctcgtgtcgcccctcctcgagctcaccgagcacccatccgctggccgcgtccacggccatgtcgagcgcttcgggcaggtcgcggccctcggtgacgaggccgggcatgtcagggcagagcacggtgtatccgccggggaccccggacgggtagagaacgaccgggtagacgagtttcatttgatccttctttcgttgattccggcttgcttccatatcgatttgacggtgaacggcgcaaggtccccgctgtgcttcgggacggtgacccttccgggcttgtccgggtgcgtgtactgacagtggcttccgctctgcgagtagagccgccatccgtccctgcggagtatcttctcgatttccttgaacctcataacatatactatacgcataatgtgtattgaagtcaaccggtgaggatttgacgagatgtaacatctaggtgtataattttccacagcaacgtaggcgagcgatttttttgaaaggattaggcgtgtgtcagtatgaacatctggtggggaaggacgagaaaggcatcgttgcggatcgtttgctggatttgactccgttgctgtctgtgatggaggattcctatgccgacgctttgggtagcgagaaacgcgatggtctgctgaacccggctcagcatcgactgaagcgtgccgagagggtcaatatgattactcgcaacaggtgggagactcagcaggcggataatccatggagagccgtcaacccctgctacacgcacctcgaggacgacatcacgaagatgcatttggaacttcatccggcggatccgttcacagggggattgccggcccctgcgaagaccaatgcggcttatgcgagatatacgcagagcggatgcctcccggccaaccgcatcggttggagtctcggactggacggcatgtatcataccgatctttccggcgtgcacttgatcgcggtatgggaatacgtcgaggggcgcatcgtcatcaccctctacaagccagtcggagccaaaaaacgagaatcctgtatcgaaatgccgttgcgcgggaaccgtgtcgagcagtccaagatacaatacagagctgccgaagagaacgggctcctgcttccggggctcgtcgacgacgaacagaacgtcgctgacgaaaacgatcacaaggacaagattgggcggcggaagaacgatccgcttgcctagatgacgaaaggaaccagccatgaccgaatacaatcccgacaggattgtcctcatgcgcaggttggaaaagaaaacacaaacggaactatccaaggacacgaagttatccgttgcaaaaataagcaagatacaaaaccgaatcgtcccgttcaaggaagaagacgcgaagcgcattgccgattgcgtggactatccgctgtccttcttcgcgatgaaggacacctccacaccgccgactgatctaacataccggcgttcctcgaaaaccctcatcagagaaatcaacgcagtctccgccgaatacgaaatcatgacgggaacagtgcgccgcatcgcagaaacaatccatctgaaatctcgactgcaatgggtcgacgagatagcgccacacaagaaagaacagctttccattgacgagatcaactggatcgccctacaagccaggcgccacatggggatcccccccacgggccccatccccaacgtcactcgcgcgttggaacgagccggaatagccgtcatgcccatgcacagctccggagaagattccgcatactccgcaaccagcgagggcgtatcggccccaaccctagatgctcccattcccgtcatcggatacttgggccgcgacaacaccggcgacagactccgtttcaccaaagcccacgaattcggccacatgattctccacaaatacaggcaccctgccacgcgccaacaaatggaaaccgaagcccaccaattcgccggagcgttcctcatgacggaaaaggatgccagaaacatcttcgcgccggattccaacatgagcatattcgcccatgcgaaagccggctggggaatggccatatcagcgctcatcatgagagcctcggcactcggaatcattgattcccaacggtcgcgatccctgcaaatacaactcagtgcccgcgggtggaaaaaacacgaaccggtcgcagtggatgtcgaatcacccctgctgttcaagcagatgataggacaagcctacggcacaatcatctccgcaacagaagcaagaatcgacagcatcaccgcatcggagcaactcggcgtcccattcaggtatcttgatctatgggcagacgggctcgaagaagaaggagcccaattcggcttctacgaaaaaagactcaatcgcgcaaaactggtcgcggagtccaaacccgaaacgtcagaaacgatgcctgtagtcatctgattctgacccagaaccgccccggcgctctggacccccgacgaggacgtgataaacgaaacggattcgacgctaaccgtccagcccctcgacgcgcatttcgaacctggaaagaaatggcatgtgacggtcggcggcgaaaccaaatacaccgtcgatatggaagatccggcattcatccacgcagtcgaaaacggcaagagaatcgggaaacgcgacatgttcgtcgtgacgatgcacactatctcatcgagaggcaaagacggaaaactcaaagcccgccacgccatcacaaaagtccaaaaacacatcccttacgacgaaggattccaaggggaactcggcatataatcaaccgctccggcgctcgcaagtgaactgcgccccggaagttggacgtggtttattaagggtacctgattaggctgtgagggacatgttccggaattcctccggggtgtgtccctccagtcgtatctggcgtcgtctggtgttccagtggatgatgtacgcgtccagttcgctcttgaactcctcgtacgaggcgaactcgcggccggtgtagaactcgtccttgaggtggccgaacacctgctcggtgtcggcgttgtcgatgcagttgcccttgcggctcatggactggcggatgcccagttccccgagcctgttccgccaccagtcgtgctggtattgccagcccatgtcggaattaaaccgacatcggtttaactcggattaagccggttttgttgttaagccggggaacggttcggggtcttggtggctggccgtgtcccatgtggtttcccggcttaacgttccgggttatttgagggtgtgtagttgtcggagtcgttgctcgctgagccatgtctccttggaggggtcggggccggggttggccgcatcgacggctttgcgcatcatgtcgagggtcgcgaacgcgtagaacgcgctggttgtgctcatgctttcgtggccgagcagttgcatgatgagcggtagcggcacgccctgttggtagaggtccatggcgcgggtccggcggatcaggtggcagtggacgcgttcgggcatggacgggcacgtcccgcggcgtgctctggccgccgcggttttgaggatctcgtcgatccggtccacggagagcggctggatggcgccgttcctcgtcgagtggaacaacggcctgtcgccgtcgcgcatggacggtccgggatggaattcctcgaggtaggcggccaggtgggttcgtgtcctttctcccaggggcacgacccggctcttgccgcgtttgccggtgagcgtgaccctggccggcttatccatacccacgtccgcgatggtcagtgcggcgagttcgccgatcctggcggcggtgtcgtacatgaggatcaggagcatgcggttcctgcgcgatttggcgtcgccggtgccccatgcggtcagcaacgctttggtgtgctcctccccgaggtggtcgacgggtttgcgcgcgggtggtttgacacgtatgccggccgcgtcgttgcccagcgcggtcaatgccgggtgttcgaggcccgcgtggtcgaggaacacgcgcatcgtcgtcatcctcagcatgatggtgcggtccgagtacccgcgctcggtccgcatccattcgacccaccggcccaggcgcgcccggtcgaaatgcccgaaaccgatgtggctgcgctgcgtgccttccgtggtttcgagccatcggacgtaggattccaggccgatgcggtacgcctcgacggtcttcggcgagctgccccgcaccttgggcagccagtggtgcagccagtcgcgcgcgactcgccagaagtccggttcaccggagctggcggccgttttccttgccttgctcatggttcctccgtttccgggaccacgcgttcggcgtcggcgacgaggtccgcgtatccgtccatgaaatcggggctggcgtgcacgtagtagagggtgctgtcgatgccggcgtgtcccatgtaggccgccagatagggcagcatcgccatcacgtccacgccgtcgcgagtccaccgctcgatgttcgcgaacgcgaaccggtgccggaaatcatagggcctgggccgtttgccggcttgtggccactcgagcccggcccgcgtccagacgcggcggaacaccacgccgggcatgcccggggagaccggattgccggtggaggtgacgaagaacgcgggacggtcgtctccgaagcgttcgcgggaccgttggtcgcattccagcagttcggcggcgacctcgtcgcccacgggcagcctgcggctgcgaccggccttggaatcgaccacgtcgatggaacgggccttgtggtcgacgtgcccgacggcgagtctcctgacctctcgggtgcgcagcccgcagcaggccatgagcatgaagaacgcgcgagactgccacgcccacggcgacggagactccaacgttcccgcggcccgcaggaacagggcggcctcgcggtccgtcagcaggtacggcgtcggacgcggggatccggccttccactggtcggagagcacgtacgcgtcgggatcgtgggccagtcgcatccacctgccgaagtccctgatgtacgagaaccacgagcggcaacccccgggattcgcgtcgatcctatgggcgatccatcgctccacgacgccccgctccagacgcacggccccgtgttcgaggcaatgccggtcgaacgagcgcaggacctggacgcgggtggcgccatgcctgcccatggacgccttgaagcggatgtactcctccaattcgccggcgagcgggccgacgaatccgtgttccgtgggtctcatgacgatccgccttccggcacgggcagcacgcacgcgagcattcccccgcggtgcgtggccatgtagacgcgtgtggaatcggggtcggcgtggccaagcaccgcgctgatcgtcggcaacggcgtggccgcctccagcatcctcgtcgccgcgttgcgccgcaacagcctggaaccgccccggcgtccgagcccggcgtgccgcatgacacggctgatcgcctcgtacaccgatgaatgaccccgaagcgcgacatggggcgccttgtaccgcacgaacacacggtcgtcgtcggtggcgggcctttcgtccaacagccaggacgccagcctcgcggccagcggtcccgtcatcggcacggtcaacggattgcccgtctttcgctgcaccagacctatgctcatggaatcccaatccacgtcggcgatcctcagaccgatcacatcgcatgccctcagcccgcacgtcagcgacagcagggtgatcgccgcgtccctcgacggcaccgaccgcgaggcgcacgcctccagcaagcggcggtgctcgtcgtcgggcaacgttcccgcgatcgcgtgggtcctgcgtatgccggccaggccgatcgcgtccgccaggtcatcccgcccgagccatctgaacaacgggcgcaggtccgacgcggcgtgccgcatcgacgactccgaccagcgtgaacgcagcccggccaggaaccccagcacatgcgagccatccgaaccgtccaacgacacgaccccatgagattccagccacgtgaggaacaagcccgccatccgacggtaatgccccaccgtcgccgaagccagtcccgaaccggcgagatacgcctcccaacgctccatgaccacggccaaacccggaaccaccggctccgcaagcctgctcctgcgccacttgcccaggtccaccgaaccggaccgcagatacgagtcgcacaaacgcgccagcctgccgtaatcgaaccaccgctgcctgctgaaaccgcccgtccgctcactgaaggtcgacgcggcgaaccccgcgcccaacccacgcgtgtacaccgcatccgggcctccggcgtaccgttccaacgccctgatggacttgcggtactggcctatggtggattccatataaccggccccgtaaagcgcgcggaccacctcgcccgcgacatggccaaccgtcgtctcacccatggcaaactccttcgttcgaatcaaatgggacaagacgaacataacccggaacgttaagccgggaaaccacatgggacacggccagccaccaagaccccgaaccgttccccggcttaacaacaaacccggcttaatcgctgtggagtatgggatcggcgccttcgggcagcttctcctcgagcatggcgagcagccgttgccgctgggtgaggtcggggtgccggctgacatcccaggccacaatctccttggatcccatgtcgtatatgggcgcgaggtacgccttgccgcccgctgccctgaactcggtgacgtccgtgcccagcttcacccacggccggtcggccgcgaagtcgcgttccagcaggttcggctgtgtctgttcaatagaaagtgggccgtggggggggtgttcctatgtttttgtcaactccttggggagttgacgtgtcgggattccggttggctgtcgtgggcgcgcttcgccctgccggtggcgtccggcgtcctttcccgtgtggcccggttcaggctacgagggctggttcctggtagagggttccgtttttgagcatgctgtagatcacgtcgcagcgccgacgcgcgaggcagatgatggcggcgttgtggtgtttgccctgttcgcgtttgcgcttgtaataggccacggagggcgggtgtttggtggatgcgacgaacgcggtctgccacagcgcgttcttgaggcgtttgttgccccgcctggagggccgttcgcctttgatgctggtgccggattggccggtgacgggcgatatgcccgcgtaggcggccagatgggcggacgatttgaagttggcgatgtcgccgccgatgccgagcaggatgttgcttgcggtcctgacgcctatcccgggcatcgacgtcaggaccgtgagaagagggtggtcctccaggagcttctcgacctggcggccgacctcgcgccgccggtccctgatcgtcttgatgtcgtgggcgatggaggggatgatggtctcggccatgagggtgccgggcacggtgacggtctgctcgccgatcgccttgaacatgtcgtcgatgatgcggccggcgcgaagcccgttggacttggcccagtccttcacgtcctcgatcccggcccgtttcacgcccatgggcccgccgtatcgttcgagcagcgcgagcgtcgcgtcgcgcgtgattctctcgcccttgagcgcgcgttcgaacgcggggtgggtctgcagcagcaggctccgcaggcggttgacgtggcgggtggattcgtgggcgaggtcctcgtcgtggccggcgagcagcttcagggcggcgagggtctcgtcatccgggcccgcgtccctgagcgtctcgggcagcttgagcgcggcccacgcgatcacatgcgcgtccctgcggtcggtcttcgcgtccccgggcagcagctgcgcggtcctgcgcatggccgtgccgggaaggtaggcaaccgcgatccccatgttccgcgccaccgtcaggggcagggagccgatggtgttgggctggtccacgaccagcagcacacggccatgcttggagagcttgcccagcatcgtgcggatggccttctcgtcctgtttcaacggcttgtcgtacagggtgttcccgtcatggtcgagggcgtgcgcgtggtgcgcgctcttgcccacgtccaggccgacccacacgtcgatgtcgtccggggtcatcatcgttcctcccgtcatgaaggttttccggtcgccgcgggctcggaggagtccggacgcccgcgccgcacccacattacgacgagacctgcgccatgcgcccctgaagcgtccgtgtagccggcctggttcctatcagcggtcatcgggcgtccccgttcccggcgacaacaccccccggatcatcgacgacagggcaggaaagtcataccggaaccggcgacccggccccgaccatcggggcctaccaaacatggtaatgggcggtgacgttttgttggacttcgttgtctgaatggtcgttcgcaacgatatcacgcgtgttcagataccgagtcctagtcgatgggggtgcggacggaaagttggacgttttggcgtccggattggagtccgcatgttttcgatggaggatcggcgcagggccgttgacctgtatttcacggagggcatgaccatcaggaaggccgtcgccgagctcggccacccgtccgagggcacgctggcgaaacgggttcgcgaggacccgcgctgcacggttcctttggccttccataagttctaggtaaaaatatacacttatatacacatatatacatgaatatgtgagttcaagcgaactgatgctacgccggttcgtccccgtccccatcaaacttgtgctcatcctcgtaggcaacgatgtccatatcgcctcgatggagtttcttgagtgtttcagccactcgcgcctgctcatcatcaacaacagggcgctcgccggctaggcatgtgagaccatcggacactgcggaaaacactgccgaacccgcccaacaaacattgaagcaatacattttttatttgcttcgttactgcgtattctgcactccacatgtgcgaaacgttggaattccgccaaaattttatttgcctggtatttgcttgggtgggtcgcaaagcgcggttgcggcacgattcttaggggtggtgccttatggcgtcgggctttccttgcaaatcgaggtaaggaaactggcccttaacccggaatttgaaaaagtaaaaggtccctggctgttcaccagccagagacttttttggtaacaactgaggttgaggaaacctcggcagtcgggtccaacggggcgaaagtctgtggcgccgccgagaagattgccccgaagctagcgcgacctttctgctacaacacagcataccagcatccatcgaaccttccccgtacactggacagaccaaaccaaggaactactagcgtggcaccttggcacggtgtcattgtgccagcaggcatagtgactggttacaactaaagaggaggttctcatggaaggcaacgaccatgacaaccgtccgagatctgaccgacaataccgggaaggcctgatgacgggcctgttggtcgctctggccaaccaagttggacagggatggtcgacggctatcatcatcgccacactggtactgcttggattaagtctcagacgaggccgctgacttgtcagcggaacagccggaatcttttacgggttccggcccctcgtcttcaatcagggcaccatttcaaggcagaagaatcaggcggcctttttgcggccgcggcgcttcatggtgccagcggtggcgttggccacgtcgaagatcacggtcttgctttcggggtaggcggtaccgttgacggactggtaggcgatttcgccttccggagcctcaggcagagtgaagtatgccttcactgcttcaatgagcgtggcttccttgacgcttaccgaagcagcctgcttgccttcgggcttgctgaacttaatggcgttgtcggccttggcggtggtcggggttacggcgatctgcttggtcttgtcgttaatcagcaccttgacgtacgccgggaatccgagcacttcagcggtggctttgttgaaacgaatggcggaatcggtgacggtcagaacggtcttgcccaccggcttgaccagctgaacctcttcgaatccctgaagcaatgaagccataattgctctccttattgcattggtaacgtgtttttatttacgccactaattgtaaccagctaatttcgcattatacaaaccatatgcatgcatgattgcataattgaagaacatttgacctacgtattgcgctccccgaatagcactgatttaaccaataccaagaaaagaggaaacaagaacccgcaatatcagccgtattgaatatagaaatatgcaatttcaacatcgcaataactgacggtctttttgctggctctattcgccgatatcgcattcaggccacagcagtgagcataatatcgacgccgtgcttgatttccgcatacacgcgttcaaacacctcgcgtgattgacgatgagggtcttcggtttcgagtgccgtaggcaaaaacggccgcagcataggtacgcaatccatgatttcgataagcttgtctgcggcggtatcgccggcaatcggaccctcagcatgcatatgtttgcaagcgttcacgaagtcattgaacagaaatactttgcgaatagccagtggattctgctcaagcaaatcggatatttgctcacgctcaaaacacagaatcaggtcggcttgccggctgatatcggtggtgagaggggtggaagaatgggaattcgcgtcaatgccgtcgttcttcagcaaatcgataaccatcggatcagcgggatgcgggggatagtgcagagtacccgcgctgcgcacggtgatattgccgctctgcaagccaattcctcggtcggcaagcttggctcgggtgtagtattcggccatcacggaacggcattgattgccggtgcatacatacatgatttgcataacaacgtcccttctcaagtgttgtgagcattccctcatatattccagtgagcattcctcgcgaatatgcgtgcgttatgtaccgtagcaataacatgaaaaaaccgggaatcatcgactcccggttcagtggtattcgcgaactatgcttcagcgtctactgtttattatgtcagtcacgtcagcgacgagtggtgttcttgcggacggcgaacagggcgatgcccgcggcggcaagcagcacaacggccacaccgtacggtgcgatggccgcaccggtgttggcggtggtagcagtcgtggtaccggactggtcaccggttccggttgccggaacctgaatggtggcggtcttggtaccggatacagcgccaacagccttgaccgcgatggtcttgccagcctggctggccttgaacgtgtacagcaaagtcaaggaaccatctgccttggcagtgaacgtcttggatacttcagcgatctgctggacgtcggcgacgatggcatcatcgtagtacacggtgacggattcattcggttggaatgtgcctgcagggaacgtcacggtagcggtggtgccgctgtaagtaaccgttgcaccgtaatcatcagccatagcggtattcgttgcaaaaccaaagcccagaactgcagcaatagtggctagcacggccataatcttcttcttcataacttcgaacctccacaatagaaccggttactatcaatagaaaatcggtcttttttcaattacaccccccaaccatacacccccttttgggcgggttctagtgatcgttgcaacacctgacctaccgcaaggagggtcaggtgaccagaagccaccgaaacgaagaccgtggcggggaacaccgttggacgttcaacggcgtcgaatatccgacgaggaagctgatgtgcgaggcgagacgcgccgagtacgtgcgcctgctggacgaggaaggcatgaacttcacccaggccgcgcacgcggtcggcgtctcgaaacgcaccggcaaggcgtggcgcaacggcaggacgcgcgccacgggaaggaacgagaaacccctggtggactggtatcgttccaccatggacaaacccaagaccctccatccgcgatacctgagccaggaggagcgcatccagatcgcggaccgtctgcgtctgggcgattcgatccgcgccatcgcccgcctgctgggccgcgaccccggcacggtcagccgcgaggtcgagcgcaacaggaatcccgagtccggcggttacgagccttaccgcgcccagcagaaggccgcggaccggctcaaacgccccaaaccgcgcaaggcggccgagggcacgcgactgtgggacgagatcgccgccgggttgcgcaggcattggagcccggagcagatagccaaccggctgaggctggacttcccggataatggggatatgcacgcgagcgtcgagacgatctaccaggccatctacctgcaggccaggggcgaactcaagcaggagctgaaacgcgccatgaggcaggggcgaaccgcccgcagaccccaaggcggccaaggccgcaaaccccgtttccgcgaacccatggccatgatctcggagcgacccccggagatcgaggaccgggcggtcccgggccactgggagggcgatctcatcaccggcagccgcaacaaaagcgccatcggcacgctcgtcgagcgcaccaccaggttcacgatcctgctgcacctgcccgacgggcacgacgccgaacacgtccagcaggccatcatcgacaagatgcagcacctgcccaaactcctgcgcaacagcctgacctgggaccagggagcggaactcgccctgcacaaacggatcggcgcctcgctggacatggccgtctacttctgcgacccgcactccccgtggcagcgcggcaccaacgagaacaccaacgggctcctgcgccagtacttccccaaaggcaccgacctatccgtctacccggaggactacctcgacgcggtcgccgaggaactcaacgaccggccacgcaaaaccctcgggttcatgaaaccaagcgagaagatcatcgaactgctcgacgccgcgtgataacctcaacaaccgacaacgtgaccatggaaggccgctcaaacctcaggtgttgcaaccaccactagaatctgccttgtcggtatataaggggtaattatgttaacgggtaagggggtgtgacaacgtggtcacaccatgtgacaacgttcgaacatactgtcgccgcattaccgttgcagcggggtctcctgacattctgaaaacgttgctattccaacgattttgctgactggcgatacgtgcatggcaaacaacagggaaattttttctgcgacacgccgacgggctactcggattctgatttgtactcgtcgtcaaaactgaacaggtcctctacggtggtgccgaacacccgcgccaaatccatggccagacgcaatgatggacagtattgcccctgttccagccttcctatggtctcacgtcgcacgttgaccagatcggcgaggtcggattgcttcataccgcgttggagtcggtgaagtttcaggctagtcttcatcgtcgccctcggtgccggcatcgtgttccagccatagatatcgaatatcggaaatggccagggcgcacatggccaatgcgggcaacagcattggcggaataatgtgaactatcgagcggtcaatcagattcagtgtggtgtagataaagccgacaattaccagaatgcccaccaaactgaccagcgcgaattgcatggccgagccttgatgcatatcggaaagctcgtcgcgtcgcgggttctgccgtcggaatgcagtcatgccccatacttcgccgccgatccacaacagcgccgcgatcgctgccacgattactccgagcaggttattgccaataagagccatcagcatgcaggcaatggcacctatggattcaaggatggcacaaaagcaaatataccgattaaaagtcatggccgtctccgtgaattatgcgagcgatattgaattgcatacgcaattataaagttagggggtaaccccttgtgcggtggttagaccaatcggcggaggctctttgcgtagaccgagaataatcgcaatcagtaattgttatgagcgatccagtagttgtacgctgcgacgatgccgccgtagcgctgctcgcagtagctgatgaaccacttgaactgggtcttgtagttggtctgccagtccgcaccggcggaagccatcttgctaccggggtaggcctgacccaagccataagcaccagacgtggggttggtggcggtggggctccaaccggactcgtggttgatgatgtagttcgcagcggtgaagtccgcttcgctatacccgttgtccaacagatactgatgcgcccaggactgcacttctccagccggaacagtggtgccgagatcggccgacgacgatgacttggtggaaccagtgcccaccaggatcaccttatccaccggggccttcttgacccatgaggcgaatacgttagaagagacgaccttgtcgccggctcgcttgaccagcgaggtggtctccataatgcccttctggccctcggtctcgaccttttcctgacccttgggcaggctgctggtctccttgcgcacttcattgaaggcgatctcggtatcgttggtctccacatcggcatccgcgcgattaatggtgaccacggtggcctcggtgaccttggatttcagcgagggagatacggcatcatccgggtcaagcgtgatatcacccgtctccagcacgtccttgacggtggtcatgttggctttttcgccaagtactacgcgcgaatcgccattaatcttcaccgtaacgaacgtggtgttcttgtcggcgctgttgattgcgccacgagtggcagaacgggatgcggccgaatcggtggcggagaacgaagtgatggtggaaatcggcttcacatcatcagcatggtagaaactgcgcgacaccaatcccgccgcgccgagcagacctgccgcggccaccacagccgcgatcttcatccactggcgcttgttcaacggtctgagcatacgggtcggcttggcatgtctcgtcattgcgctccttgatcggatttcacactgcccaccatgataggcggcgcagtggatgaaggaaaatcaggctcaggcctgctggtcggcaccggactgggcggccttggcggcggccagatcgagtgccttggcctgggcgatcagatcgtcgagatcggcggcctgcagcgcgccggcctgctggaagatgacctcgccctgcttggcgatcatcagcgtgggcaccgcctggatgccggcggcctgggccagatcctggttggcgtcgatatcaaccttgacgaaggcgatgttcgcgttctccggctcgttggaggccgcctcgaaaatcgggccgaacgcgcggcacgggccgcaccaggtggcccagaagtcaacgaacacgatttcgttgtcggtgatggtcttctcgaaatcggcggaggtgatggcggtggttgccatgatgttcccttcttttgtgttttccttggcatcgccgtacggccctcatgcgtggccgccgggcgattgccttattcatgcaatacgtcttggcgcttggggccgtgcggttcgtggccgtcggctccctgctggctaccagcttcccagcaccacccaacatttgtgtcgtattttccgccgccggccaaacgtttcccaagatttcgccgtaaggtgacgcgtggcgtgattttgcgcgcaataatgggatgcatgccagtcatgaatgatgaagtgcccgacgagggcgattatgatgccggccgtggccgcggcgaattcgacaacatcacgcccgaggacttcatccacggaggcggttccggtcacggcaacccgccgggctggctggggccggccgacatcaaccaggcgcgccatcagatgcccatcgcgtatgtggagatcgtgcccgtgcgcaccgatgagatgggccgcatctcccaagtgggctcactgctgcgcgtatccgaggacgggtcgatcgagcgtacgctgattaccggccgtgtgctgtaccacgagacgttgcgcgaggccatcgcccgcaatgtggccaaggatttgggcgatatcgccttgccgctgctgccgattgggctccagccgttcaccgtggccgaattcttccccacgccgggactaagcgaatactacgatccgcgccagcacgccatcgcactgtgctacgtggtgcctatcgccggcgactgcaagccgcaggacgagacgctggatgtggaatgggtggatcccaagagcgacgtaatggacacgttcgtggcgcagatggtcaacggtcatggtcgcatcgtgcggcaggcgttggcctgggccggaatctgacagttgttttgccttccgttggaggggatggcgcgtagcgacggagggcggtccgcgttgagaccgctcccagccgactgtgccgacagctccgccagtggggcgcgaatgtgaaggagtaattcatggcaatcgaattggccaatcatatctaccgcgacggcgaaggcgtgccggtggtgctgatgaacgcctacccggtggaccaccgcatgtgggacgtgtgcgcgaaggcgctcgccgacttcgccgacctgaacgacgtgccggacttcccgatctgggctccggacatggccggctccggcgcatccccggtgccgagcgacgccgattcgggcccccgcatggcgaacggcgcgtacagcgaggcgttggatcgcctggccggagcctacgtggacctgatcaaggccgccggctatgagcaggcgatttgggtcgggctgtcgatgggcggctacgtggcgatggacatccagcgcctgtaccccgaaacggtggccggactggccttgtgcgacacgatggccgcgtccgacggcgtgggcggagagaaccgactgaagatggcggacgccgccgaacagacgaactcggtcgaaccggtgatgcacttcgcgcagccggccgatggcgattccaccgtcaagaagactcctgaattcatcgcgaccatgaccggctggatcaacgaacagaacccggctggtctggcctggcgccagcgcatgacctacggacggcctgaactgggggcggtgccggaaacgatcagcgcaccgagcctggtggtatccggcgaactggacccctccagcaatccgagtgtgatgcggccgctcgccgaacgaatcaccggcgctgaattcatcgatattccggactgcggccatttcagtgccgtcgaacatccggataccgtggcgcgagcactgctctcgctcgtcaagcgcgtgcagagcgcgcagaagaaagcataggagacttcgatgaccgctgacattcatttctcgcctctggcgctgacccatgcgctgccgttcctgccgctcgcacaaggtgacatcgactatcaggtggaccggcgaagcgaacccggcctgatcgacgagctgctggccgagccgaccaccaaagtcgtgcttacgcgcggcggactcgtcgccgtaccgcgcggccaaggcgagctcgtggactatgagaacgtgaaaatgcggctcgccacgttgccaggcgcctatgtgtccgccgaactggcacgctaccccgaagcggtcgccatgttcctcggctcctatgtcggggcgcgcggcgaatccgtggtcgccgtggatatcacgcgcgtgccggaagccggcgttgctggtgttggcgggattgccggtgttggcggtgccgtcggcggcgtgctcggcacccaggattccggcactgtggacggcgcgctgggcaagaacggcatcagcggaggtgctgccgccggaatacggcagccgggaaacaccaagggcaatggtggcgtaaccacagccaagatttccgggtcgctcggtgtaccggattcggccgggcaaggtgcggacgatgccttcgatgattcggtcggcgcgtccgtacagcccttggccccgaagcccacgctgctgcaacaggccgtgacccggttcgactgggtggacctgcgcggattcgcccctcacgccaacgcgcgcgaggccgggcaagccaccagtgccatcaccttaagcatctggcacagccgtcagcggttctgccccacctgtggcgcggcggtccggccggcgctcgccggatgggcgcagcggtgcatcaacgaggcggacggcaaccgtgtgctgttcccacgcgtggagccggcggtcatcaccgccatcgtggacgggcacgaccgtctgctgttgcaacacaacgcggcatggaaggattcgaggctgtattcggtgtccgccggatttgtggaggcgggggagaaccttgaacacgcctgccgccgcgaggccatggaagagaccggcatcaagcttggcgaggtgcggtacttgggttcgcagccgtggccgttcccggcttcgctgatgatggcgttcaaggcacatgcgatcaccaccgacgtgcgtgtggacggcgaggagaccatgaccgcgcgatgggtcacacgcgacgaatacacggccgagctcatcgccggccgtatggtggcgccgggccgcgccaccatcgcccgctacatgattgaggaatggctcggtcgcgagctgtgacggaccgcgaagataggttaggcttatgactatgagtgatgacaacgaaaacgaacagccgctgaatctcgacattcccgaccatctcgaatactccgaggagcatgcgtgggtggaccgttcggtcgaccccgcaatcatcggcatcaccgaatacgccgccgaccagcttggcgaacttgtgttcgtggatctgcctgagcctggcgcccgtgtggaggccggcgacgagatcgtggagcttgaatcctccaaggccgtccagccgctgatcagccccgtggcgggtacggtcaagtatgtgaaccgtgacgtggcggacgacccgtccgtggtcaacggcgatccgtacggcgaaggctggctgctgaaggtcgagcttgacgacgatgagccggagctgctgagcgccgacgaatacgcgaaggtcgtgcggtagttccttttgagctcccctctctgaggggagccaagaaaaatgaggcgtatggcctatattggtgtctatgagaagcccacgcgaggattttgaggcggcaggcaagcgactgccttgggatgctgctgctcgcaatgcagcgctgtccgccaccgcgccagtctctgacgtcaaggcatccgtcaatggcgtcgacaatgccagcaatgctgaacattccgatgacatgcccaccgtgccgattcccgcacgcaaggctgccacgacgttcgacaccccctccaagcgtgagcgcatcgaagtcaagccgccgatcacccgattcatacgtcgtgccgtcacccgcgtgttcggtgtatggtcacgcatctccactcaggtggtgcgccaatgggactggtatccgcgagtggaaccctatgtgggttatggtaccggcgattactcgcgtctgatctgccgcacggtatacgcccccaagcacgcgcaatccggcgaactgatccgcggcatccgcggcatgcttgccatacccgcgccgcgcacccacgtgcaggccagcattgatgacatgccgctcaacaccgtgcagatcggcgtctccgaggtctatgacaaggtggaccgcacgcgcgatctcggcagcgaatacgccatctccgattccgccggatacctcgacctcgtggccgagcatcgtctggtgcccggcatccatcgcgtctcctacagcgtggccaatcgcaaacccgtgagcgccaacctgtacaccatccccgccagtgccaaagtcggcatcatttccgatgtggacgacaccatcatgatcacgcaggccccggtgccatggaaggccgcgtacaacctgctgttcctcgaccccaagaagaaagcctccgtgccgggcatgagcgtgctgttcacccgcatcgccgacttgttccccggcgcaccgttcttctatctttcgacatcgccttggaatgtggagagttcgattcgcaacttcatcactgaccatggttttcccgaaggcccgctgctgctgcgcgacctcgacccgaggcccaagaccttcgtacccaccggcccccagcacaaacttgagtttgccgaacaacttatggccgacttcccagacatgaagttcattctggtgggcgatgacgggcagaaagacccgaccacgtacgccaccatcgcccgcagatatcccggacgtgtactggcgatcgtcattcgtgagttgagcccgcgcgaatcaaccggattggcgtcggtgacggggctcacctcgacccagccgactccggtaaccgatgtgccagtattcaccggcaccaccggctcgaacattctgaagaccatgctgccgtatctgaagacggtgttgcgataggcgcggcgtgatgaacactgaatgcgtcccggtgcggtgcctcgcctataatcgcgtggtatgactgacgagagcacaaacgccgcggccgcgatgccgccttacgccaagcgcgagccgaagcgccgcgaattccacggtgacgttttcgaagacgattacgagtggatgcgagacaaagattccgatgacgtgcgcagctacgtagctgccgaaaaccagtactgcgagcgtcgcatggcgcatctggcggatttccggcatacgttgtttgaagagctgaaatcgcatgtggaagagaccgatatgtcggttcccacgcgcgtcaatgattactggtacttcacccgcacgcagcagggcaaacagtatggcgtgcaatgccgcatccccgtgcgcgatgccgatgactgggacccgccggtcgtggatccgcaaggcgcgcccggctccatgcccggtgaacaggtcgtttttgatgcaaacaaggaatccgaggggcatgacttcttccggctcggcggcttggatctgagcaaggacggccgttggatgctgtacggcgtggatgttgcgggagacgaacgatatgatttccgcattcgcgaccttgccgggctggagaccggggagccggtcagcgaactgcccgaacagttcaccggcattggcagcgcatgcttcacgccggacggccaatgggtgttctgggtggaattggacgattcctggcggccgctcgctgtgtggcggcatcgtgttggcacggcggtcgaatcggatgtgtgcgtgtaccgagaaaccgatgaacggttctgggtgggcgttggcatcagttttgatgagcgcaatatcgtgatcggcaccggttccaaaaccaccaccgaagtgctgatgctgccggtggccacgcctgaaggcgaattccaagctttcattccgcgtcagaacgatattgaatatgatgtgagctttgcctgttttgaaggcgcgggggagaacggtgcggatgtgccactcgccgtggtctatcacaacgccgccaatccgaatttcgaaatcgacgtcattgacatgcgtggccatgagccgccgtaccgactcggcgaaggcgtgtgcattgccgccgggtcgccgtacggctgtgaacatggtgagccggataagccgattaccgaggcatacttcaacgccgtcaatccggcgatattgcagggtgcccacggtctgggcatcgaaggcattgcgttgcatcgcaactttgtgtccctgagctaccgtgccgacggccagccgcgcgtggcatacatgaccaagagcgcggctgccgccgacttcctggccggacggccgtggcggtttacggaattgctgccgcctgccctggaggacgactgggacatggttgccgacgatcgcgaaaacttcaccggcgatcatggcgaaatcttgtggaccgaagatgaggcccccacggatcacacgtcatcttccgatggtgctagcgacgaccacctgcccggtgagacccggcgcttgtacaccatcggcgtcggcggcaacccctcgtatgaggcgccgcgcatgcgctactcgttcgccagctacacccgcccgggcgagttgcacgaaatcgatcccgccaccggtgaagatgcgctgctgaagcgagccaccgtgttgggcaacttcaatccacgcgattacatggaacgccgtgtgtggattaccgcgcgcgacggcgaacgcattcctgtttccctcgtctggcaccgcgattgcccggcgcaggattcgccgatgttcattaccggatatggtgcatacgagatttcctccgatccggggttctcggtctctcgtctgagcatgttggatcgcggtgtgctgtacgccgtgccgcatattcgtggcggcggcgaaatgggacgcgcctggtatgagcaggggcgcagactgaacaagaagcattcctttgaggacttcgtggacgccacacgcgcgctgcagaaggcgcatttggctgatgcttggcgcaccgtggccaacggcggatccgctggcggcctgctgatgggcgcgattgccaatatggcgcccgaatgctacgccggtgttgaggcggatgtgccgttcgtggacgcgttgacctccattcttgacccggacttgccgttgaccgtcaccgaatgggacgaatggggagacccgttgcatgaccctgaggtgtatcagtatatgaagtcgtacacgccatacgagaatgtgccggtcgccgtgctcgagggcggcaacgacgaggctgccggtgacggcagtgctgatggggctgccaccggcgcggtcgccgccgcgcaattcccgagaatcttcattaccacctcgatgaacgacacccgcgtgctgtacgtcgagccgctcaaatggctggcccgtttgcagtccgccggcgtggacgcggtggccaagattgaggtcgaggccggtcacggcggtctatccgggcgttacaagcaatgggaagaggtttcctatgagaacgcttggtgcatggatgtgatggggctcgctcattaggccatgtccactagctgagcgggttcgggccggcaggtgatagcgcgagtaggctccttgaactatggcaaagacatataaaatcgccgttattcccggcgacggtattggcaaggaagtcactccgtgggctcagaaggctttggaaaaggccgctgaaggcgtagctgacttcgagtacgagaacttcgacttgggtgccgagcgctatctgcgcgatggtgcgatcctgcccgaggacgaagaggagcgcatcaaggccaacgacgcgattctgctcggtgccgtgggcgatccgcgcatcaaggccggcattctggaacgcggcctgctgctcaagctccgcttcgacctcgaccagtacgtgaacctgcgcccctccaagctgtacaagggcgtcacctcgccgctcgccaaccccggcgacatcgacttcgtggtggtacgtgaaggcaccgaaggtctgtactgcggtgccggcggcgcggtgcgccgcaacaccccgcaggaggtggccaccgaggtgtccatcaacaccgcatacggtgtggagcgtgtggtgcgttacgccttcaagctcgctatgaagcgcaagaagcacgtcaccctggtgcacaagaagaacgtgctcgtcaacgccggtgatatgtggcagcgcatcgtcgacaaggtcggcgaggaataccctgaggtcacccacgactaccagcacattgatgcggccaccatcttcctggtctccgacccgagccgtttcgatgtgattctcaccgacaacctctttggcgacattctgaccgatgaggccggctccgtggtgggcggcgtgggctactccgcctccggctgcatcaacgcctccgacgagttcccgtccatgttcgagccgattcacggttccgctccggacatcgccggtcagaacaaggccaacccgaccgccgccatcctctccgccgccatgctgctcgagcatctcggctttgatgatgcggccaagaagatccataccgccgtcgaagcggacatcgaggagctcggctccaccgtgcgctccaccgaccaggtcggcaaggacattctggcccgcatgtgacctcaaacttggctcccctcgctgaggggagccagaaaactctctatactgagttgcatgcaaatgcgacatggggaatgcaaaaccgttgacagcaaactagtcgccgtgaccgtatccgtcgatgatgacggcaccgcacagtcatgccatatcagcggtgatttctttattgaatcagtttcggatgccgaatctcatgctttgttgcatgacctggaacgagctctaattagcgatgattcattgcggtccgtattggacgcccatcctagttgccaaattatcggcacagatgaaattgccatcaaaaccgcatacagccgagccgtaagcagcaacttacccccgctggcgggggctccagcgcagcgggtgggggtgggcagccccgatgcgccgaacatcccagcatccatcaatacacaaaccaagcagcccgacaaaagctctgaataccgggagcgctggaacgccctcaagcctcaactcaccgtgatccacggccatccgcgtactccggacgagcaaatggccattgacgagacctgggcgcgtgaagtcgcagcaggaacacgacagccgaccatccgattatgggagtgggcgggcccggctgtggtcatcggccgtttccaatcggcccaggacgaggtgaatctggacattgccaagcagctcggcttcgacgtggtacgccgttgcacgggcggcggagcgatgtttatcgaaccgggcaacaccattacctattctctgtatgcgccgctcgatttcgttcagggcgtaagcatcgaagaatcctaccggctctgtgactggtggctggtcgaagcgctgcgcgaacttggtttagatgtgcggttcgcgggcctcaatgatatcgcctcgcagtacggcaagatcgggggagcggcgcagcggcgcttccccgtaggctcaggcggcgcggtgctgcaccatgtgaccatggcatatgacatcgatgcggccaagatgagccgtgtgctcaacaccagtcgcgagaagatgtcagacaaagcggtgaaatcagcggtcaaacgcgtggacccgatgaaaagccagacgggtctcagccgcgaacacatcgtcgagcaccttattgactggtttgcggcgtgatttcaccgacggccgtatacgattttgccgctggccgtgcgcggttttgtcatgggcgagcgcggtagccgcgacagtgccgtttttcgcggtaacgcattcgtcagcatgtcgtacggctatcggatcgtgccacacatgaagtgacgaatgagggcatgctcctgacgaaacctgtggggcgcgttacaatatgacggatgggcgacgacggtcataggacaataaggatggtgcgatgagcttggaaacgccaaacgcttttgctgacgaggaaaacatcctgttgcatacggcattgttcaagcaggtatcgccagccgaagccgaggagctgttgccgcatttgaagcatgcgacgttcgataaaggcgactatatcttctccgaaggcgataccgatcagcgcatgtatttactggagcaggggcgcgtcaagctgattcgcacttcttccgatgaccgcgtgcagctgctgtccatccacgcgccgggcgaagtgcttggcgagattccggtattcgaccctcatggtggcccgcgcaccgcgtccgcggtgtccatgagccatggcacgcgcgtggtctggctggagcatgatgccctgttcgcatggcttgatgagcatccgcgtgtggccatcgacatgttgcaggtcatggccagccgccagcgcggcaacaacgaacgcatctccgacttggtattcatggatgtgccggcgcgtctggccaagacattgctcaacttgggctcacgtttcggcgagccggtggaacagggcctcaaagtgccgcatgacctgactcaggaagagctggcccaactggtgggctccagtcgtgagaccgtgaacaaggcgttgatggacttttccaaccgcggatggatcgcacgtgacggccgatcgatcatcatcttccagcccggtatgctgattcgacgctcgcggcgctgaccgttcggctgacttccagccaatgttacgctagtgcgattcttgtgatgatatgttcacgggagctgaccgtaagcccggttggtagggcaccccatttagaatggggcccatgcccaaaaagaagtccctcactctccaacgtgtgcttgttctcctcttggcctatatcatgcttgccgtctgcggcggcgtggcggccagcgtgttgtttgtaccgggtgtgatcggtgccaataaagccgccaaagcggtgattccgtcgctcaaggtagaaaacgtggacttcgacgtgactagtctgccccagaagtcgacgatgtacgcgcgagacggttccaccgttatcgcgacgttctacaaccaaaaccgtatcgtcgtgccgctgaagaagatttccaaaaccatgcagcaggcagtggtggcgcgcgaagaccgtcgattctggactcacgccggcgtcgacgtgcaaggcgtgatgcgtgcgttcgtgcagacctacctcgtcaaaggctcccagcagggtggttcgtcgctgacccagcagtacgtcaagaacgtgctgctgatgcaggcgatcgaggatgacgattcgatcgcccagtaccatgccactgaagacaccatcgcccgtaagattcgcgagatgctgatttccgtgcagatggaaaagaagtattccaaggccgagattctgcagggctatttgaacatcgcccagttcggcaacaacctgtatggcgtggaaaccgcggcccagcgctacttcagcgtgtccgccgccgatttgaacgtggtgcagtccgccaccatcgcggctatcaccaagaacccaagcctgtacgatccgctggtcgaagagaaccagaaggaaagcgaaaaccaacgcaatatcgtgctcaagctgatgctgcaggaaggatacatcacccaggaccagtacaccgaagctgtgaacacgccgttgaaggacacgctgaaagtacaggacgtgaatgtcggctgtcaggacactggcgattacgcgtacttctgcgattttgtggtgcatcgcatccagaactccgaagaattcggcaagactcgtgccgagcgtaacaagctgctgcaggagggtggcctgaaaatcgtcaccacgctggatgtggaagcgaattccacgatgatggagaccgcgcgtaataccattccaccggacgatcccagcggcatggagatagccatggccgcagtcaaaccgggaaccggcgaagtgctgagctttggcctgaatcgttactatgacgccactccggcagccgcgaacgatcccaccaggacgagccagaactatgccgtcgatttggcggatggcggtggttctggttggaccatcggttcgtcctggaagccgatcaacctgattgcgtggatggaagcgggccattccatcaacgacaacctccagacctcgacgtcataccccactacggacttcgcctgcagtaactattcgggcggtgccgattcgtggaacgtgtcgaacgccatgggcgcaggtacagtgaacccggaaagcccattcctcggtctggtccgttcgcataacactactcaggcttccatgggtgccatcctcaaactgtgcaaggtggcggacaccgcgactgaactgggataccatgacgccgccacgggtgagaccatcgacaaaacccaggtgtatacaccatccatgatgatcggctcggtgaatgtgtccccgctgaccatggcgagcatcttcgccgtatacgcctcgaatggtgtgcaatgcaacccgattgccatcagcaaggtgaccgataaggacggcaacgatctcaaggttccatccgcgaactgccatcaggcggtggataaggacatcatccaaacactcgcttataccctgaaccaaggtacggtgcggccggatggtgccggttggtcattcagattggctgacgggcgtaagtcgtttggtaagaccggtaccagtgaggatcttgcggtgtccggtggatcgttcattcctaatcagattgcggcgttcgctgtggtcggcgatgcacagaacccgtacaccaaccgtatttccaacattgccatcaacggccggtacaacagctattgggatggttcgacaatcgcggctccggccgttaccaacttcttcaatagctacatttccaagaagaaaataccgattgacaacgattacggccagcccgtctcgaagtacaccacgactggcaagtatctgggcattggcggacgaacgttcagcgtgccgcagaccactacgaatggcaacagccaatcgcagagcagcaacaatcagtctcagtcgcagaacactgggcaaaacaacacccaaacccagggcaccaattcagagcagtcgaatgatggccagtgattggtgattggcgtttgacatttggtgattgcatgccggctgagtctgcgtagcatggccgactgcgatacccaaattacgtagtttgcgggcgttacctgtttcaggtgacgcccgttttacaatacttaatgacaacgccatcgcgttcatcgaatatttgccatgaacgtgcatcggaaaggggaacgatgagcaacgacgatctgacgcatgagaattttgattttcgtggattcgacgtgccggatctcaaagcggtgacgctggcttcgtcttcggacggcgatcagtccaagcagccgaagaccaagcacgaggatgcatcgaagaaccgtaagcacggtaagaagaagtcaaaatccgatgcacggtccaagaagcgggccggcgcgggcaagacgagcgaatcgttcgatgattatgaggaaagggaagctgtgagcaaggcagataagaaagtcagcaaggaccgtccggggctgtttgcgccaatgacgctgcgcgaggtgaccgtgcgtaatcgtatttggttgccgccgatgtgcacgtattcgtcgttcgcccgcgatggtaggcccacgccgttccactaccagcattacgtgtctcgcgcgttcggcggattcggcatggtgattgtcgaatccaccgccgtggctcctgaggggcgtatcacgccgtgcgatctgggcctgtgggaagacgggcagattgatgcttggcgctggatcgtggacggtattcgcgaggcgggtgcggtgcctgccatccagctcaaccatgcggggcgtaaggcttcgactggttgctttgccgttggttacgacggtcagaacgtgccggaggaggcgggcggctggcctaccatggcaccgtctgaaatcgcgttcggtgggttgcgtacgccgcgcgcgctgtccgtggatgagattcatggtctggtcggcgcgttcgccgtggcggcgggccgtgcggtggccgccggcttccaggcgattcagattcatgccgcgcatggctatctgatttctcagttccttgacccgctgagcaatgagcgtgatgacgaatatggtggcgatttgaccggtcgctctcggttcctggtcgaggttgtggatgccgtgcgtggggccgtccctgagggcgtgccggttctggtgcgcatttcggccacggattgggccgccggcggttgggatttggaccagaccatcgcactatccaaggtgctgaaggagcatggcgtcgatgtgatggacgtatccaccggcggcatcatgtcgggagtgtcgattccggtcaagccgaactatcaggtgccgttctccgagcaggtcaaggccaaggccgatattccggtgaccgcggtgggtcttatcaccaagccgaagcaggcggccaagattctggcccatggcgaagccgatgccgtggagattggccgcgccgcattgcgtgatccatactggccgttgcgtgcagccaacaagctgggcataccgtccaccgagatcccctacgccccgcaatacgtggccggtgcgtactaaatcctcatggggcggtaactttcccatagggcggtaactttcccatggggcggtaacccaaaacggcggtattctgcggaatgtgaaatttggctaaccgccccatgggacaatcaccgccccatgagggttttaccgccccatgggtaatagggcaatatgtgagttcactccacgtctacgccgacggcgtcggagacgtgctcgaatccgtcgcggcgcagcagctgggccagaccgcgtttcaacacggtaatctgctgcgggcctcggtacatcagcgagctgatgaacatgaccaagctggagccggaacgaatcttcgcataggcttgctcgggggtaaagacgccaccgatgccggcgatagcgaaccggtcgccatactctttatacaccttgcgaatcagctcggtgctggcgttggtgcacgggccgccggacaggccgccctcccaatcgcgcggaatctcgaggccggtgcggtccttctgcagattggcgatggacagcccctgcacattgtgctcggccagcacatcgagcagttccttgtactcgccccacggcttgttcaacggcatcttgaccaacgtgggctgcgggcggtcgatcttgtcgagcgccgtaaacagacggtcgagcgcttccggagtcgcggtgaacggttcgccgacgtgcgtgttcgggcaggagacgttgacctccaccatcgcggtgcggccggcggcgcggcgcattgaaatgcagtaatcctcaatgccttcgtccaaatcgccgcactggtcgtcgttggtgcgggcgatcgacacggacagctgcatctggcgggcctgagtccaagccttctcggcgcgctcgatgaccttgtccgaaccgatgttggcgaggccgacgtgcaccatcatcgaatcgtattcaggcagacggtggaaccacggcttggcgttgcccgggcagggacgcgaggtggtggagcctacggtttcgaagccgaagccggcatggtccagcaccacgggcatctcgcagttcttgtcgaggccggcggacaggccgaacgggttggtgaaatcgacgcccatcacattcgtttccagaatggggtcggtgtagtcgagcatcagctgttcggcgatcagcagcggcgggacgttcttgacgacgtggcagaactcgatcatctgatcgtgtgcctcatcggggcggtggttgaacacgaagttcggtttgatgatgtgcttgtagccgaaggtgaacagatcggtggtggctttgttgacggcgtcatgccagaagctttcagaaacgtaagtcataccgcctattgtctcacgcttgggccggtgcggctaggcgattcctacctaggcgaattggggaagggggctaccgctgtgagaatatcggttcgcgcaatgtgcgattttgcgcggttttgtggaaatgacacctgaattgcccggaattttcgagaaattgtccccaaaacgctcaagccggtttggtttgtgagcttttgtgtgcgataatgttcgcatgatttcgtcacaacgtcagcacctcatcttgagcaggttgcgcacacgcggggcagtgcgcattacggcgctatcgaaggaactgggtgtgtcggcgatgaccatccgccgcgatatcgccgaacttgccgacaagggactgttgaagcgcgtccatggcggcgcggtgactaccagtaccttgctcagcgaacccctgttctccgtcaagtctcagatggatatcggcctgaaggacgccatcgcccaggaagccatcaaatatgtggctcccggcgatgtaatcgccatcggcggcggcaccacggcctatgtcttcgcccagcatctgctcgaatcgcagcagtccagcggcatcaccatcctcaccaattcgattcccgtggccgaactggtccaggccctcgaatccaaggacgtggaggtgatcgtcaccggcggcgtgatcacccgatcgaactcgcttgtcggtccgatcgcggacaaggtcgtcgcctcgctgcgtgtcaacaccgtattcctcggcacccactcggtgtcgattccccgtggcttcctgatgccgaattcgctggaagccgcaaccgatatggcgatgatggacatcgccgatcgcaccatagttttgaccgatcacaccaagtggagctgcacatcgctgtcgctgtttgcgcgcttcgaccaagtggacacggtcattactgacgacgggctcgaccccgactccgccgccaaaaccaaggatttggtaaaggaactcgtgctggcccaccagagcgagaccattgaggaaagtgagtaaacccatggctgatttcgccaactacacccccggggagtatgcgaaggagcacatccgcatcacgccgacgacgcttgccgacggtcgtgacttcttctacctggacgacgaccccgagttcgtctccggtgccaagtcccgcgagctcaaggacccgcgcccgctggactaccgtttcgccccgcacctggacgccgacggcaacgaagtgccgtacgccgccccgcagatgcgccgcgacccgctgaccggcgactggatcccgatggccaccgcccgtatgaaccgcccgatcaccgccggccccggcgctaccgccaagggcaacccgctggccgcccgcaagcccggtgacccgtaccaggacggcgaagtgccggacaccgactacaacgtcgtcgtgttcgagaaccgcttcccctccatggtgcgcgtgcccggcgtctccgaggacgtgacctacgttgacggcaacccgctgtgggagaagaagctcgccgccggccgctgcgaggtcatctgcttcgacccgaacgaggacggcctgccggccgatctgccggtctcccgcctgcgcaccgtggttgaggcttgggccttccgtaccgccgaaatctccaagatggaaggcatcgagcagatcttcccgttcgagaaccacggccaggaaatcggcgtctccctcgcccacccgcacggccaggtctactgctacccgttcatcgccccgaagatggagaaggaactccagcacaccgaggcctaccacgagaagaccggtggcaacctcttgaaggacatcatgaacgccgagctcgaagccggcgaacgcatcgtgatgcgcaaccacagctgggtcgcctacgtgccggccgccgcccgttggcccctcgaggttcacgtggctccggtgcgcgacgtgctcaccctcgaccagctcaacgacgaagagcgttgggaccttgcctccatgtactcgcacctcctgaagcgcggcaacgccttcttcgacaagggcgacggcaagggcatggacctgccatacatcgccgcctggcaccaggccccggtgcacgacaagcgccgtgagaactaccgcctgaacctgcagttcttctccttccgccgcgccgccaacaagatcaagtacctcgccggctccgaatccggcatggccgcctggatctccgacaccacgccggaactcatcgccaagcgcttccacgagctcggctccatcgacatcgccgactgatagaaagaaaacatcaatgactgctgttgaattcattgagccgctgacccatgaggaaggcgtctcgcaagctaccaagctgttcgtcgacacctacggcgctgcgcccgagggcgtgtgggctgctccgggccgtgtgaacctgatcggtgagcacaccgattacaacgccggcctgtgcctgccgatcgctctgccgcaccgcaccttcatcgccctgaagccgcgcgaagacaccaaggttcgcgtcgtctccggcgtggctcccgacaaggtcgccgaagctgatctcgatggcctcaaggcccgtggcgtggacggctggtccgcctacccgaccggtgtggcctgggcgctgcgtcaggctggtttcgacaaggtcaagggctttgatgccgccttcgtctcctgcgtgccgctgggctccggcctgagctcctccgccgccatgacctgctccaccgctctggctctggacgacgtgtacggcctcggctacggcgattccgacgccggccgtgtgaccctcatcaacgccgccatcaagtccgagaacgagatggccggtgcctccaccggcggtcttgaccagaacgcttccatgcgttgcaccgccggccatgcgctgctgcttgactgccgcccggagttgaccccgctggagaacgtctcccagcaggagttcgacctcgacaagtacaacctcgagctgcttgtggtcgatacccaggctccgcaccagctcaacgatggccagtacgctcagcgtcgcgccacctgcgaggaagccgccaagattctcggtgtggccaacctgcgcgttaccgccgacggcatctccaaggccgatgaccagttccaggccctcaaggaaacgcttgacgccctgcctgacgagaccatgaagaagcgcgtgcgccacgtcgtcaccgaaatcgagcgcgtgcgttccttcgtgcgtgccttcgctcagggcgacatcaaggctgcgggccgtctgttcaacgcttcccacgattcgctggccgccgactacgaggtcaccgtccccgagctggacatcgccgtggacgtggcccgcaagaacggcgcctacggtgcgcgtatgaccggcggcggcttcggtggctccatcatcgcgttggtggacaagggtcgttctcaggaagtcgctcagaagatcgccgacgaattcgaaaagcaaggcttccacgctcctcgcgctctcgcggcttatgccgctccgagcgcttcgcgcgaggcctgagcccgcatctgagctccctctgacgagggagcttcgttttatcccgcgacacgctgggtggacttacgaagaatcttgaatcgtattacggtgacggattgttttgaaaatcgcatggcatctgccgaaatcacatggcagacaccatgcgttttttattgccgtcgttggcccggacgttaggggcgtaacgacattttcgcgcgacggcaatctgagaggtaatccaagagaggttccgttgtccgctatccagacaacttccgataacatcatgcccgccggcgaatccggcaccgcttattcccatagcccccacaacgcttccgaaaccaggcatttcgaccatccgcataaggtgatgctcggcctgtacatcggcgcattcctaggcatgctgtccgagacatccatgaacatcgccctgcccgatctgatggacgagttctccgtatcctccggcaccgcacagtggatggtcgttggttatatgctggccattggcgtggtgctgccgtgcgtgggtttcatgctcaaatggatcaaagccaaaacgctcgtgctgttcgcgctgacctgcttcctcgtcggtgccttggtatgcaccgtggccaccggtttccccgtgctgctcgccggccgaatcgtgcagggcatcagcaccggcatcgtgctgcccaccatgtacgcggccatcatgcgcgtcttcccgccccacaaaatcggtgccgccaacggcgtggccggcctggtgatcatgttcgcgccggtcatcggccccaccctggccggcgcgctgatcggtgccctgagctggcgcgcgatcttcgcgctgttcgccgtcgtcgccgtaatcgcactggcctgcacggccgcattcttcgtcaccccaatcgaacgcacgcgcccggccgtggacatgctttccatcgtcgcctccgcgctgggcttcggctgcctcgtggccggcgtgagcctgatcagcgacatgggtttctccgtggcggtagtcggtttgttggtgattggcgtagtcgttcttgccctctacgcctaccgtcagctgcacatcgccgacccactgcttgacctgcgcgcgcttggcattgcggcgttccgtacgccggccatcatggtcagctgctcgtttgcctgcactttggcgttcatgtatttggtgccgcaggaattgcagcgcggactgggcatgagctctacgctcgtcggtctgctcatgctgcccggcggcatcgtcaacgcggtgtgcacgttgatggccggtcgcctgttcgaccgtcatggtgcgagggtgctcgtgtgggtcggtgtggtgatggcagccatcggtggtgcgttgttctttgccatcggtgttgactcgggtgttgtgctgttcttggccgcgcacatcatcgtgatggtgggcattccgttcatccagcagtcggcgcagtccgctgcgctcaaatcgttgccgggccgcatggctgctgatggcagcaccattctcaacaccatgcagcaggtgtgcggcgccatcgccaccgctgtggccacctgcctgctgggcctgggccagaccggctatgcggccggtggcggtgccaatgccgcgcagggcttcgtggacggttcgcgctacggctatatgttcggcctcgtgcttgtggcaatcgtgctggtcttctcctttatgctcaagggcggcaaggaagaaccgaagctggtgccggtgcaggtcgacggcggtgcggttgagagtctggccgtgtgaacatggcccaacggactcgatgattcctgagagtccgcgaatccggaaatggaacggcatgaatggcgtgatgcaggtttgtgacttgtttgagctgttccattccggcggtattggtgcctggcaacggtcagacgacagacgatacatgaatcggtaatgaacataatggcgggtgtcttccctatacttggggagtcatccgcttttcgtatacgaccagggagagccatgaataaggccatcatcaccgtcgtcggtcaggataccgtcggcatcatcgcgcgcgtttgcacctatctgtccgagcacaacgtcaacgtgcttgatatttcgcagaccatcatcgacggatatttcaacatgatgatgattgtcgactatgccaatgcggacaaggactttggcgccatggtcggcaaccttgaggatcttggcgacgacatcggcgtgcgtatccgctgccagcgtgaagagatcttcaccaagatgcaccgtatctgattctgatatagctttcgattccctcccgctggcgggaggtggcacatagcgccggtggggggtctcatgttggataccacccccagtcggtttcaccgacagcccccgccagcgagggcgaaaaaacaaccgtaaggaacacaccatgctgaatatcatggaggtccacgagaccaatcagatgatcgagcaggagaagctcgacgtccgtaccatcaccatgggcatctcgttgctcgactgtgcgacggacaacgtcgacacgacttgcaacaacatttaccgcaagatcaccacctacgccaaggatctcgtctccaccggtcaggccatcgagcgtgactacggtatcccgatcgtcaacaagcgcatcaccgtcaccccgatttcgctggtcggcgccagctcctgcaagaccagcgaggacttcgtcaagattgctcacgcgctggataaggcagccaaggaagtcggcgtcgacctgatcggcggctactccgcgctcgtttccaaggccatgaccccggctgaggaactgctgattaagtccctgccgcaggcgctttccgagaccgacatcgtgtgctcgtctgtgaacgtcggttccaccaagaccggcatcgacatgaacgcggtcgaactgctcggccacatcatcaaggacatctccgagcgcaccgccgacaacgactcttacggctgcgtcaagtttgtggcgttctgcaacgtgcctgacgacaacccgttcatggccggtggcttccacggcgttaccgaaggcgacgcggtcatcaacgttggtgtctccggccccggtgtggtctcccgcgcactcgatgcggccaaaggcaaggacttcgagttcctgtgcgagaccatcaagcgcaccgcgttcaagatcacgcgcgtgggccagcttgtggctcaggaggcttcccgccgtcttggcgtgccgttcggcatcatcgacctttccctcgctccgaccccggccgtgggcgactcggtgggcgaagtactcgagaagatcggcctcgaacaggttggcgctcccggcaccactgcggccttggccatgctcaacgaccaggtcaagaagggcggcatcatggcgtcctcctacgtgggcggtctgtccggtgcgttcatcccggtctccgaagacaagaacatgattgacgctgccgcctccggttgcctgaccctcgagaagcttgaggccatgacctgcgtatgctcggtgggtcttgacatgatcgccattccgggcgatacctctgcttccaccatctccggcctgatcgccgacgaagccgccatcggcatggtcaaccagaagactaccgccgtgcgtgtgatccctgtggcgggcaagggcgttggtgaaatggcgaacttcggcggcctgatgggctacgcgcccatcatgccggtcaaccagaccagctgcgaggccttcgtgacccgtggcggccgtatccccgctccgattcacagcttcaagaactgattcagtagggtatctgccttcaaagaggtacctccggctcttcgcggagagctatctgctttcagagaggtacctatatacggaaacctcgagtatgcgcgttggaatatcaacgcccatactcgaggtttcttaattgaagtacccctttgaaagcagaaagcattctgcaaacgcccgaatgtacccctccgaaggcagatatcggttcgaattacctttcgagaggtctattcccgtttcgaggggctgatttcgacctttctggaggtctacttccgtttcgaggggctgatatatgcgaagaccccgagtacaagcgttgatatttcaatgtctgtactcggggtttcatcctttgacagccccttgaaacggagatagacctccggcggatgccgaatcagcccctcgaagcgccgatagacccattttctgcgttcatttccacaatgatggtcgtgctgcgaggctcagggttttctccctcacgcctgtcggcgttcgttcggcgtcgctactcgaaggcccaccgggccttctcctcagcgccctccagcgaagttgagttggcgccaggcttcgtagatggcgatggacgcgcaattggtgaggttcagggaacgcaaggacgggcgcatgggcagtcgcacttgttcggccacatgagggccctccatgatgtccatcgggtcggggatgtcgccgggctcggggccgaacagcaggatgtcggtcggcttgtattccacctcggtgtacagcttggtggcatgtgcggtgaacgcgatgatgcgcgaattgggcatggactccaccaggttgtcaaaattcgggtgcagcaccacgtgggccatgtcgtggtagtcgaggcctgctcggcgcagcttggtgtcgcgcaggttgaaacccaacggctccaccaaatgcaggatggtgccggtcaccgcgcacaggcggatggccgagccggtgttgccgggaatgcgcggtgagtagtagcacagatgcggtgttacggtttcggtggtggcggccttttcagccgagagcatcgcgtccaccacggagatggggttgccatgcgcgtcggttacgagttcgtccggtccgtaattcgatttacggtacccgtactcgaacatcttctcgacttttgtttcgggattctgtgcgttctgcgaattctgttctgcctcgttcgtcatagctgctaagaataggaatgatgaacgacacagcaatttctttgcggctcggcgcatggtgggaggccaatgcgcgtgacttgccatggcgcttcggacgggccacgccgtggggcgtgctggtcagtgaggtgatgagccagcagacgcagatgagccgtgtagtgccgtactggaccgactggatggaacgctggcccgacgcccgcgcgctcgcggaggcccccaaggccgaggtgattacagcatggggccggcttggctatcctcgccgtgcgctgcgattgcaggaatgcgcccgcgtggtggcggaagaatatggcgatgagctgcctcgcacctacgacgagctcgtcgctctgcccggtattggcgactacaccgcctccgccgtgctgagctttgcatttggtgagcgcattgcggtgatcgatacgaatattcgccgcgtgctgagccgcgtattcctcggcaccgaatctcgcgggggagcggcgagcccggccgaacgcgcgctcgccaaccgcatgttgccccaagacagggttcgtggggacggtgccgattgcgcggaccatgcataccgatccggcgaacacactttcctgcagcgcagcgaacctccatcggtcacgtggaatcagtcggtgatggaattgggcgcggtggtttgcacagccaagacgccgttatgcgagatttgcccgattgcggatgattgtgcatttctcaaagccggccgccccggactgggggagcggcgcacccgcccgcggcagcgattccaaggcactgatcgtcaggtgcgcggactggtgcttgcggcgttgcgcgcattgccggcgaatgacacgcttgccagagtggatgccgaaaacctatggaaagaccagattcagctcgactcctgcatcgcgagccttgatgatgacgggttgatcgagattctggagaatggtgcccttcgtctgccccacggctgattccgcacagtgctatgaagtggttgaaccgcacacgtgtgagagcgtacgcgtggatgagcggatgatatcgctgagcggaatattggtcttggctgacattctgtgaaaatatgggactgccgtgcgtgtatggcgatgacgaccgtacactgaagaggttatggcagtgcagaggaataagtcaggtgcgaatcctaaaagcgccggagacggtcgtggcgggtggggccgcccgatgtctcgcggcaaaaacacctctcgcaagtctgcttctcggaagttctccaatcctgttcgctccggtaggactgccaaaaccgcgatacctgcaaagaccatccggtctgccaaggcaggtgctgccacaaagcgcaccatcagtaagaagaagcaggcgatgtaccgtcgccgccgcatcgtggttggtgtggcattggtgttagttctcgcgttaatcgtattttgcgtctacagccttggccgtggtgtcggagctatcaacacggcaattcatcatgacgaggtgtatgccatttcccgcgacaccgtgccgacgccgaagaaaaccagcggcgttaaggattgctcggccaaggatttgtcgcttgatctgagctcggcgtcccaatccgtgccggttggcgggtcattggaattcaccgccaagattgtgcatgacggttccgacagctgtctggtcgatggatccgatgcgggccgcgtgctcaccattacttccggtcagcaaaccgtctatacctccgccttgtgcgccacggattcccgcatgctgttgatggccaagggagacaaagacattcagcagctcaaatggaatgccgattccaatgccgcgctgaccgagtgcacggatgaggcggactggcctcgcgtgaatgcgggaacgtatgtggctcagctgagtctgaaggatcatcccaaggtgaagagcgatccagtgacgtttacggtggagtaattttttttttgggggggggggggctccgggcttctctccaccctcgcccgtgtgaagtcggcctcgttatcagcgggaagtcgcgcaaaagatgtcctgctatagcgctattcttttgactttgcatgaggtgtgtcatattgcgggcatgccgtcgacaatgaagcgtccgcataggcatatggtggccatgccggcgctcccaggggaattaccacatattagcgagcgataaggaacgtccattggctactgagtctacgacgaacaccaccaccatcatcgcacgcgccgaccagcatgacattgacctgcacaaggcgtcggatcgcgtgaacttcggttccatcaaggaacccatcgatgtgccctacctgctgggcgtgcagaccgacagcttcgattggctgatcggctccgaccgctggaagaagcgcgtcgaagaggatgaggctaacggcaccaacaccgtggcccacacctccggtctcgacgaggtcttcaacgagatctccccgatcgagaactttgcacagaccatgtccctgaccttctcggacccgtacttcgaggagccgcgccacaccgtgcaggagtgcaaggagaaggattacacctactccgctccgctgtacgtgaacgccgaattcgagaacggcgacaccggcgagatcaagtcccagaccgtgttcatgggcgacttcccgctgcagaccccgcacggtaccttcatcatcggcggcaccgagcgagtcatcgtctcccagctcgtgcgttccccgggcgtctacttcgaccgccagcaggatcgcacctccgataaggaagtcttcggcgcgaagatcatcccgagccgtggtgcatggctcgagttcgagatcgacaagaaggaccagccgcaggtgcgcgtggaccgcaagcgcaagcagtccgccatcgtgttccttatggccatcggcatgaccaagtccgagatcgcccaggcattcaaggactacccgctggtgctcgacgcactggagaaggaaaacctcgagacccaggacgaggccctcgttgacctctaccgcaagattcgtccggccgacaccccgacccccgaggccggcaagaatctgctggactccttctacttcaacaccaagcgctacgatctggcccgtgttggccgctacaagatcaaccgcaagctgggtgtcgaggccgatttcaacgatcgttccctccaccaggaagacatcatcgccacgatcaagtacctggtggccctgcacgacggtgcggcgaccttcccgggcaagcgcaacggcgaagacgttgacctgcgcgtggacgtcgatgatatcgatcacttcggcaaccgtcgtatccgccaggtcggcgagctgattcagaaccagctgcgtaccggtctgagccgtatggagcgcgtggtgcgcgagcgtatgaccactcaggacgccgaggccatcaccccgcagtccctgatcaacatccgcccggtgaacgccaccatcaaggagttcttcggcacttcccagctctcccagttcatggatcagaacaacccgctgtccggtgtgacgaacaagcgtcgtctttccgcactgggccccggcggtctgtcccgtgaccgcgcctccatggaggtgcgcgacgtgcacccgtcccacttcggccgtatgtgcccgatcgagtctcctgaaggcccgaacatcggtctgatcggctccctggcaaccttcggccgcgtcaacccgttcggcttcattgagaccccgtaccgcaaggtcgtcaacggtcacgtgaccgacgaggtcgagtacatgaccgctgaccgcgatcttgaccacgtcatcgcccaggccaatcaggagctcgacgagaacggcaacttcgtgcagaagtccgcccttgcccgagtcggcgaagaagaggcggtcgatgtgccggtgagctccgtggactacatggacgtctccccgcgccagatggtctccctcggcgcctccctgatcccgttcctggagcacgatgagggccaccgtgcactgatgggtaccaacatgcagcgtcaggccgtgccgctgatcgaatccgagcgcccgctggtgggcaccggctccgaatggcgcgccgccaacgactccggcgacgtcatcaagtccgagaaggacggtgtggtcacctacgtgtccgccgacctgatccgcgtgatgaacgacgacggcaccaccagttcctacaagctggctaagttccagcgctccaaccagaccacctgctacaaccagcgcccgatcgtccacgacggcgagcgtgtggaagccggctcggttatggccgacggccccgccatccagaacggcgacctggccctgggcaagaacctgctcatcgccttcatgccttggaacggctacaactacgaggatgctgtgatcatctcccagcgcctcgtgcaggacgacaccctctcctccatccacatcgaggagtacgagatcgacgcccgcgaaaccaagctgggcgccgaagagatcacccgcgacctgccgaacgtcggcgaggacgccgtggccaacctcgacgagcgcggcatcatccgcattggcgccgaggtcgaggccggcgacatcctggtcggtaaggtcaccccgaagggcgagaccgagctgaccccggaggagcgcctgctgcgcgccatcttcggcgagaagtcccgcgaggtgcgtgacacctccctgcgcgtgcctcacggcgagaccggtaccgtcatcggtgtcaaggagatcacccgtgaggatgccgaggaggacggcgacgagctgcccaacggcgtcaaccagatgatccgcgtctacatcgcccagcaccgtaagatcacggtgggcgacaagctctccggccgccacggcaacaagggttgcatctcccgcatcctgccggaagaggacatgccgttcctggctgacggtactccggtcgacatcatgttgaacccgctgggtgtgccttcccgaatgaacctcggccaggtgctcgaactgcacctcggctggattgctcactccggttgggacatctctttggatccgaatctggaagccgagtggaagaagctgattccgtccggtgccgagaaggccgagccgaacaccccggtcgccaccccggtgttcgacggtgtcaagcctgaggtcctgaagggcctgctgtccaccacgctgccgaaccgcgacggcgaccgtctggtcggccccgacggcaaggccaccctgttcgatggccgtaccggtgagccgtacaccaagccgatttccgttggctacatgtacatgctgaagctgcaccacctggtcgacgacaagattcacgctcgttccaccggcccgtactccatgatcacccagcagccgctcggtggtaaggcccagttcggtggccagcgcttcggcgagatggaggtgtgggcccttgaggcctacggcgccgcctacacgctgcacgagatgatgaccaccaagtccgatgacgtcgacggccgcgtgcgcgtctacggtgccatcgtcaagggcgataacctgccgccggcaggcatccccgagtcgttcaaggtgctcctgaaggaaatgcagtccctgtccctgaacgtcgaagtgctcaacgccgaaggcgtggccatcgacatgaaggatgaggatgacgatccggccagctccgctgacgacctcggcttcaacatcggcgcccgccccgacgcggccgccaaggaagaccagaaggccgaagagcccgaataccagtgatccctcgggctgcatgcggtcaatacgccgcgtgtagctccgccaacgtgaaataaataacgtacagagacctttccggtttgcactacccctcagtcaaccttggctgacagctcccctgacaaggggagcttgggaaggtctcaagaacagaaacggattaacaagtgctggacgtcaacgcatttgacaagattcgcatcggccttgccaccgccgatgacatccgtggttggagccacggtgaggtcaagaagcctgaaaccatcaactaccgtacgctgaagcctgagaaggacggtctgttcggcgaacagatcttcggcccgacccgtgactgggagtgcgcctgcggcaagtacaagcgcgtgcgcttcaagggcatcgtctgcgagcgatgcggcgtcgaagtgacccgcagccgcgtgcgccgtgagcgcatgggccacatcgagctcgccgccccggtgacgcacatctggttcttcaagggtgtgccttcccgcctcggctacctgctgaacgtcaccccgaaggacctggagcgcgtgatttacttcgcctcctacatggtcaccgaggtgaacgaagacgagcgtcacaacgatctgcccggcctgcaggacgagttcgattccgagatcaaacgccttgagcagcgccgtgactccgacatcgaagcccgcgctaagaaggtcgaagaggatctcgccgcccttgaggaggccggcgaggccaagggtccggcccgcaccaagctgcgtaacggtgccgagcgcgatatggccgccatccgcacccgctacaacgaccagatcgcccgtgtggacgctgtcttcgacaagttcaagaagctcaagcccggcgacatggtcgacgacgtggacctgtggcgcgagatgcaggaccgctacggcgattacttcgacggctgcatgggcgccgaagccatcaagaagcgcctgcagtccctcgacctggagaccatctccaaggaactgcgcgaggagatcaaggacgcttccgaacagcgtaagaccaaggccctgaagcgcctcaaggtcgtcaacgccttcctgaccaccggcaacaagccggaggccatggtgctcgacgtgatcccggtcatcccgccggacctgcgcccgatggtccagctcgacggtggccgcttcgccacctccgacctcaacgacctgtaccgccgtgtgatcaaccgtaacaaccgtctgaagcgactgatcgagctcggcgcccctgaaatcatgctcaacaacgagaagcgcatgctccaggaagccgtcgactccctgttcgacaacggccgtcgtggtcgcccggtcaccggtgcctccaaccgtccgctgaagtccctgtccgacatgctcaagggtaagcagggtcgtttccgtcagaacctgctcggtaagcgagtcgactactccggccgttccgtgatcgtggtcggcccgtccctgcgcatgcaccagtgcggtctgccgaagccgatggccctcgagctgttcaagccgttcgtcatcaagcgcctcgtggacctgaactatgcgcagaacatgaagtccgccaagcgtcttgtggaccgcggcgacgccgaagtatggggcgtgctcgaggaggtcatctccgagcaccccgtgctgctcaaccgtgcacctacgctgcaccgtctgggtattcaggcattcgagccgatcctggtggaaggcaaggccatccacctgccgccgctggcctgcgccgccttcaacgccgacttcgatggtgaccagatggcagtccacctgccgctctccgccgaagcccaggccgaggcccgctcgctgatgatggcttccgacaacatcctgaagccggccgacggccacaccgtgaccatgccgagccaggatatgatcctcggtctgtactacctgtccactgtgctggaaggcgtcaagggccagggccgcgtgttctcctcgctggaagaggccgaaatggccctcgaccgccacgagatcgacatgcaggccaaggtgctcatccgcctgcccgagagcttcgtgctgccgaagaactgggagcccggcgaggtcaaggtgctcgacccgcgcgaaggtgaggacgaggtcgtcaaggaagaacgcttccacgacggcaccgtgctgttcgccacctcctacggccgcatcctgttcaacgagaccctgccgaccgactacccgttcgtcaacgagcaggtggccaagggccgtctgtccaagatcgtcgatgacatcgccatgcgttactccacccagcaggtggccgccacgctggatgccctgaaggatctcggcttcacccgcgcaccgtggtccggcgtgtccttcgcgttctccgacgtgaacgagccgcccgagcgcgacgagaagatcgccgagtacgaggccaaggccgacaaggtcaacgccaactacgagatgggtctgctgaccgaggaagctcgtcgtcaggaactcatcgacctgtggaccgagtgcaccgccgaggtgtccaaggaagtcgaggagaagttcgacccgacctccaacctggccatcatcgtgcagtctggtgcacgaggcaacatgatgcagatcaaccagatcgcaggtatgcgaggcctcgtggctaacccgaagggtgagatcattcctcgtcctgtgaagtccaactaccgcgacggcctgtccgtgctggagtacttcatctcccagcacggtgcacgtaagggtctggccgataccgcactgcgtaccgcagaatccggttacctgacccgtcgtctggtcgacgtctcccaggacgtcatcgtgcgcgaagaggactgcggcaccaaggccggtctgcccatccgcgtcgccgagcgcgacaacgacggcaacctggtgctcgtcaaggccgccgacggtggcccgtactcccgtctgctcgccgccgacgtcatcgacccggccgacggacagaccgtgctgtacaagcgcgacgacgccctgtccatggacgtgctcaacgacctcgtggcccacggcgtcgaggaagtcaagtgccgttccgttctgacctgcgagtccaagcgcggcgtgtgcgccaagtgctacggctggtccctggccaccaacaagctggtcgatgtcggcgagaccgtcggtatcgtcgccgcccagtccatcggtgagcctggtacccagctgacgctgcgttccttccactccggtggtgtggccgcggcctccgatatcacccagggtcttccccgtgtcaccgagcttttcgaggcccgcaccccgaagggtgaggccccgatcaccgagttcgccggcagcatcaagatcgtggagaacgatcgcggtcgccagatcatcctgaccccggacgccgattccggcgcaccgaaggaagacggcgtgatcaagccgatcacctaccaggtctccaagcgcgtgccgctcaaggttgccgacggcgaccacatcaaggtcggcacccagctggtcgaaggttctgtggaccccaagaagatcctcaccatcctcggcaagcgcgccgcccaagtcaacatcgtggaggaagtgcacaccgtgtaccgctcccagggtgtggatatccacgacaagcacatcgaggtcatcgtgcaccagatgacccgtcgcgtgaccatcatcgactccggcgacaccgacctgctgccgggtgagctggtggacaacgcccgcttccgcgagatcaaccgcaacatcgtcaagaacggtggccgtccggccgtcggtcgtccggcgcttatgggtatcaccaaggcgtcgctggccaccgactcctggctgtccgccgcatccttccaggagaccacccgcgtgctcaccgaagccgccctctccgagaaggtcgacgacctcaagggcctcaaggagaacgtcatcatcggtaagctcatcccggccggtacgggcctcgcccgctaccgcaacgccgtggtcgagcccgacaaggccatccgcgacaccatctacccgaacttcggtctgggcggcgatggcgatctcggcgacgcgagcttctccgacgccgacctgtctgacctgaacttctcgaacctcgagttcggcgatctgaagctcggcgacgacttcaacccggatgatttctactccgatcagggcggccagcctgacatcgaggagtaagtgagagggtcctagaaaggatgccccttctaggactcagatcttgcgttaatcgcaataagatggcccggaactatatcagttccgggccatccgtatatttgccattgtgattttcctgttgaacaagagcaggcagccgctcgttgcttgattactcaggcctgtttttcggagaactggaagaactggtctccgatacgcaccgtggcaggcgcgctgagcttgagcggtgtgcccttggtgacttgggtctcctggccattggtgatgatgtaggtgccgttcaacgagccgtagtcctcgatccacagcgcgccatcggtgtcgatgctgatggcggcgtgattacgggacgtggtgcgggtcgggtcttcgatacgctccgccttggcatcctgcggcacattcatggaaggcttgcggcccagcaacgtgctcttatcgatcacaatggtctggccggtgacatcgttatgcagcaggtacgtcttcttcggtgccttggacgtgaacgaggaggagagcacggtgctgtcccaatcctcgatgtcgttttcggcggcgtgcggtgtggtgtctgccggagcggtggcagcgggctcagcggcggcggccgtggcggcaggctctgcggtaaaagcggtattggttgccgcttccgcggtactgggctgcccgtagtcgttctgcggttcggctgtgccaactgtggaatccggggtgccttccaccggatcgtcagaataccaacccagttcaggtgctggagggtagggaagtttggccatgatgatgccgtcctttcactgacgggaagccagagcggcgttgattgccgggtcgccgagctggcccagccattcgatcagtgccggataggtgttgggattacgtgcaatgcaggcgcgtagttcaggcgcgtactgggcaatctgggcgatttgcatctggtcggtggtggtcagggcctgttcggcggtgaaaccgtaaggattggtggccacaggctcctcgaatgccgcctgagccgcgggctgctgagcctgctcggcagcgggctgcagggccgcctgtgccggggcttcctgatcctgaaccggcccgccgaatgcctcggcagtgaacccgtattgcgccagggtctcgcgggcgcgatcgtcaccgaactcggcgatccaacgcttcaagccgggataacagcgcggattcacggcgacattggcaccgaattccggattctcgtaggcgatttttgccaacagaatcggatccgcgttcggatcctgaacggcagcgaccgcagcatcataatcaaccatgggattacctccttatgttcgctcggttatgccgaacgtatggtccgtagcgtttgtagtgttgcgtcttcaatggcgccgatatcctcaccttcgtccagcctgaatgcgctgaacgcatgatgttcgggttcggtcaatggcatatcggccacaatcacagtgatattgtcggttccgcccgcatcaagagcggccgccaccaaggcgtccacggcctcctgcggactggaatgcgccgcggcgatggccgcgatctgttcgtccggcacctcgccatgcaatccatccgaacagatgatgaagcggccggtcagatcggcgacatatacgtcgggcatgatgccatccggatcacccagacattgtgtgatgatgttgcgtggaatggtcgcctccgcctcttccggcaacatctgcccggaatcgatggcttcctgacgttgcgaatggtctcgcgtgatgcggatcagcgaagcggcgtcccacacgggaatgatatccgtggcgggaacatcggcatgcgccaacggactgagatggtaggtgcgggaatcgccgacattgaccacataggtctggtccgagaagtcctgatcatcggcgtcactgaacaaagcagcgctgcgggcgctggtggaatccgcatgatcttggggcagtaccaaaccggagcaggtcgtgccggccacgccgccaaggcggtctcccagatcaagaatgtcgtgctgggcccgggccaaggtgtcgtcgatatcctgacgggtgcgtgacggcatggcggccaattgtgcgaaatgctgggcagccaactggcttgcctgctcgccgcccatgccgccgcccatgccgtcacagaccatgaacacgccttgttgcgcgaatccggtgtcttggttgtttttgcgcctaagacccacgtcactggtcatcgcgatacggatggagcctgtggtcatgacgccttccccttcttacgcgcgcgcttgacatgcgtcgtgtgcggctttgctgcgcgcccatttgacagtatagccacgcttttcagggaaagtcgtgtacgtatcctcctgaaacgcggcaaagaagcgagcattgccttgcgtaattggtcgactcctgtccaatatgtggtggcttggcccgattcaatgtcttgccccgagaacgtggcgtagtcggcttcccggccaagctggatcaaagcctggtcatctgtgccgagttgacgggcgatggcaccggcctgatctcgacgagtgcccttggctgtgatgccgctttgctcggcaagcatgcgtatggcattccaacctgctgccacacgggctttcggactgccatgccgccgcgctcgtgccagcagtatggccttgaacatcagaatcagaccgcaggcgatgagtagggtccacaatgggctgccgtacagggccaccttgcgggtcactcgccagaaccgcgcccagaacaggttggtcggcgaatcatcggcgtcggcgccggccaatgagctttggcccttggcttgcgtctgatcgcgcagcggatcggtcaacggcactggtggttgccggaccagcgtctgcggattcggcggcgtcaggttctggttttcatcaggcatcttggtctccttgggcgtcggatagaacgccacccatcccaggccctgcaatttgatttccacccaagcggtgacatcgttgccggtgaattcgattttggtgccattgcccgaggtcttctccgtgcgggcatcggtgatttcgccatcctcgtttttcggcaggaagcccaggaccacacgggagggcagtcccagatcacgagccatcagtgccatggcggaggcatattgctcggagtcgcccaccatggccgtgcctgccagcagcttgttgatgcggtagttgccatggccggcatcggagggatagtcgccttcaagtccatgagagaaccatccggagtctttcaatgtgtcggccaacgccgtggctgcggcaccgcccgaggactgcccgccggcaatggacgtggccagtttgctggccgaatcgggaacatcctgggcttctggttgggtgatgcgggccgcagccgcactgctgatctgcttatcggtgggcttacgggcgataatgccggattcggtataggtgaggcctttacgcgtgccggcgggaataatggcggaatcggtatccgtgttgtagtaaaacgtgtcattgccgttgtcggcatcgttggcgaagctcacgccagtggccgctcccgccagcggcagccaggtgtcggtcagtccctgatcgacggtgaaggtcgcagtgaaggatttaccctgctcatccgccttgatcgtggtgcccacgcgatgataattcgaggagtccgtggcttcggaagaatcggacaggttccatactgtgccgtcgaatcgatccatcaccgcaagtttgaccggtgttccggccggcagattatggacggtcaacaacacgtcttttttgtggtccttgatataggatcgcatgccgctgagcgggctggtgtaatcgtaggggcttaacggcggatcgtagcggtcgcgcagcacgaaacggtcctgcggcaccagcaacgtgcccccgaaagcaaggccggcagcgagcacgacgatgatcagcgcggatatccagcgcccccattccagcagttcaagacgccaagacagccagataatcagcagcaaggcaaaggcaatgccgcaaatggcgcgttgccagccgctgtctgtgcccagcagggcacatacggccacggccgccgcaaggggcagcactcccaccagagacaaccatgcgttggcattaatggcaaacacgccggtgaggaacgtaagccacaggccgatggtccataccgccatcagcacgccgtcttgcgtgcccagaggcggatcgacggaaataatgtacttgaacgagccaaacgtcatttcccaacctgaactcaaggtcttcaaggtgggaatcacgtaatgggacgtagtggaactcagcgttaccaccgggccgatgatgaattgggcaaacgccagaaacacgatttgccaccacagtcgcaacgccggcaacatgcccgccagagcgatgatcgcgcccagcaaggtggccggtacagcggcaatcgcccaagtggccacgccgccgtacacgtcgatgagattggcttgcgccagcaacatcatcgccgctatgagtacgaggctggcgattcgtttgccccacggctggcgactgaggcccatgccgcgaagcacattgcctctggtcatccagataaccgaatgtgtggagtcggcccaggagccggtggtggtggaggtcccggtgtacgtgccggaggaagtgccggtgtatgtgccgctcgatccggcgtacgcagcggtattggtattggtgatactggactggtcgaaggtcatgcgagcacccccatgatcagtgggagatcatcgagttcgccgatggtggccaatgtgaagttggcgaatcttctgatgccgcgattggcgccggcgctggcctgcaataccacgcagctggccgatcggggcaaggccaaggtcatgcgcttgatctgctcgatgtctttcagcgatccaacagtgaaaaaatagaacgaagcatcaggactgtgcttcagcgtgccctcggcgagattcggattatcctcacgatcaggctctatggcactggcgttgtcgaggaactccatggcgttgcgcggctggccgtgcgcgttgcccgcgtggcagaacaatggacgatcctgcagcaggcatttgacgccgatggaagagtggatggacaccgccatctcgaattcctcgccgttgacgtattcgtccgggttcacgctgatggtcaccgaggtgtcggtgcggcgcgtggcctcatattggcgaatcatcaacgtgccggttttcgcggagctcagccagtggacgttacgcacgtcgtcgcccggctcgtattcgcgcaatccgtagaagtcgagatcatcatccacgatctggccggatggttggccttccagatcgcggggcacgccggcattcagggtatcgagacgcacggtacgagggtggatgaatacggtgatgcggtcggccagctccttttcgtgacgcaccagaccgaacgggtctcccttgcggatgcgcaatgggccgatgggcagtattgcgcgcgatacggtacggaactccacatcggtttgcttggattgcccgggagccagcatggggatgttgaatcgttcatgcgcatcgccgattggcagatatccgcgtgctgtggtcgtcggcgttctgccggtgttgtcgatgccgacgataacggatacggtgtctcccacggtcacgcgatgattggatacggcgatggacgcgtggaagcgtgtgttgccgagggaaagcgcgattgccgcgagcatcatcaccatcgccacgatgccgaatacgagcagctcataccagcccagaaacgggaacgcaataaggcatgcgatgcctgcgcccgttaccgcccagcccaagggcgagacgtaggatgcgaagaaccgtctgatgcgtcttaccgcgcgcttgaacatgcgttcagcgcgccggcgacggcgtgatgtggcggatgtagatgccatggtcggatacctttccaggccctatcaggaaccgatggtgggggagggaacgtcttcgagcacctgtgcgatcaggctttcctgagtcgcgccatcgaaggtggcttccggagtcagcgtgatacggtgtgcgagcacggccactgcaaggtccttgacgtcatccggcaccacgtaggcacggccatcggccgcggcccagatacgggcgcatcgggtcagtgccaaagcgccacgcatggaggagccgaccgtgatcttctcgttgtggcgggtcgcctcgacgagcctgacgatgtattcacgaatcgcatcatccacatagatttcggtggccacctgacgcagccgcatgacatcgtcaccgctcagcaccggggaaatggtctgcgcacggtcggtgatatcgacctgcttgaggatatcgacggacacatcatggcccgggtagccgattgacgtcttgataaggaatcggtccatctgcgcctcaggcagcttataggtaccgagctgctcgatggggttctgggttgcaatcacgataaacggctgcggcacatcatgggtgacgccgtcaacggtgactttctgctcttccataacctccagaagtgcggactgcgtcttcggcgatgcacggttgatctcatcggccagcacgatggaggcgaaaatcgggccttcacggaactcgaattctccgcgcttctgatcgtagaaagtcacacccaccacatccgaaggcagcagatcgggcgtgaactgaacacgcttgaaaccggtggaaatggaattggccaagcctcgggccaactgggtcttaccggtgccggggttgtcttcaagcagaatatggccgccgaccatcagtgcagtgacgcattgcttgatagggatggtcttgccgataaccaccttggagacattctcgaccagcgcattgaaggactgctggaaatcccggacctgagccgtgggctggggcagtagtccggaattgatgctggcgggcagtgccgatgcggctgcttgcgcggctttgctcgactgacgctgcggctgggattgtggctgtgattgcgcggtgacctgctgcgggatggctggcgtcgatcccttgcgcggcttgagcacggtgctgtcatcgcccgcagggatggaggcggcgtcagtggtaggagacggcttttctgacggcgcttgtgacggccgctgcggcaggttaggcagcgcaacggactgcggcgccgactcggtgcttggggtcgtgccggtgtgtggtgcggatgccaggtgcgtggcgtcggacaagtgcgtgctgtcggatagctgcgtgctgtcggacagacgggtcgtgtcagacaactgcgtcgcgtcatcgatgttctcgctcatggatgttctcctactgcttgtgaatggtggttgacgatattggggtattgccgaaaccaagaatccaggggttcttggccaaagtggtgacatcggtaccggatttgagcgacttggtcccctccgaggagtcagagggacgtgtgcccgcgacgctgcctccgtccgcagtgttgtcgagaccggagtatcccggcccgccggtgattttgacgctccacgcgtagttgccatcggcggccacggccaagtcggtgacatccaatggctggccggagttccacgtgaacggttggccattgatgatgatttgtacagtggccgacttgccatagacatcaaccgaaccgccggtgacgttaatgacgtgagcgttgtctgaccagcgcagctcctgcggtttgttgattacagccttcttctcataggtgtaaggagcgccattgtgcgggcctccggtggcggcgtcgctggtagcgccgttgaacacctgttgcaccgatgcggtgttgcatttggcccaaggacccattcggaagtcgagtgagttccggttagtagctgtaccggaatcgatgccatcggcagtcacgctgtaggactgcgcatgtccctgcttggtccaatgcacggtgcatgtactgccggatccggtggtgtagacgtcagcgggcggctggaccttgtactgcgggacaaagcggctctcgcccgtgccggcggaagcatcgcgctgcggcaccacggtggctgttacggtgatttcccgggtgttcaaatcgttctcattgatctcgaacgtagtgccactgtcactgcaatcgatggtgtccttgacgtctcctcccaaggaaattcgccggcagccggcattgcggttgttgccgagagtgactttcgccgttaccgtggtgtcgtcgttcgacaacgcaatgttcggcgcatccgggtctccccagatcttctctgacggcgatgcggcggactcggcactccaattgattttgttatgggctttgacggtcgccgtaatggcggtgccatcggaaatgtcgttgttgttgaacgtaaacgacagctcggtagccgtattgccggtttccttggtctgcggagcacctgcaccggtgacggtcaccgaatagttatcgacggcgctgaaatcaccgctcggtgccttccacgtcaccttggcggttttattgccacccgtgaccgtaacatcggtgggagcggacggcaccttgtccggtgtggcttcgacggcggtggacggcttggaccagccgacgtcatttcgcgcggcgacggtgaaggaataggttttgccgttcttcagaccagtgacctggcatgaggtgacggcaccgcaatccttctctccggtggcggtaccggtccaactgaccttgtagttggtgatcgggctgccattggcggcaccgggcgtccatgtgaggctgaccgcgctgtcctgcggttccccggctacgggggagagcagtggcggctcgggcttgtcgatcacggacacggtaatcgatgcggtgacttcacgatccttggacttggtgccgtcttgcacggtgacgagcacggtgttcgtggaagcacccacatcggatgcgacggcgatggtgacgtttccggaggcatcgcatccggcgatggtgagtttggcggcgtcatccgccttgcagctgatgacggtcagcgaggaatcggggaacggattgtacgcgccggtaagcacgttcacggcatcgttggcaccggccttgatcttcaacgtcttgtcgccgacgcgtgccagcggacgggtcgaagacactacgcgcacggtcacaccggcattcacggtgcccgcgccgtatgcgatttgcacgggaatggacgcggtggtgccaggagcggcatccttggtggcggaaacctgcaagctaccggaacgggacaggtttgcggtgatttgcctggatgatgagcttccaccggaatacgtgtattgcttttcgtcgtcatacacgccggacggtgcatgggtgagcgccgtcagatcaacggtcttggggtccgcgcccgcctcgacatcaatagtggaggacgagaacgtgggcggcggcacatcgcggcctatcaccgtgatctggagagtgatcactgcggaattgatgatcttggtcttatccgatccctgcttgccgtccacagcggtaaaggtaatggaggcggggcctgcgtagtcttttgccgcagtgaacttcagggtcttgtcgttcacgtagaaatcggagttggaagccttggtggcgctgacggaatcagcgctttcgatatacggttccttgccggcgccgacgcgaacatagtcattgatgttgatttcaatggtctcgcgcgagttgaccttcaattccggtgccttgggacgcaacgtgggcggaaagacaccataggccggtacctggatgaacgcggtggaggtgatgttgtatttcgtattggtcaccgtgtaaggcacggctcgcgcctgtgacgtcaggtcgacggtgatggtggtcgaatgctcgccgcccttgacgtgagcgtgagcgctggcggagggatgcacgccgaccttgagctcattggctgtgccggaaggattggcgatccactgggaaacatccacatccacggacttcttatcgatggtggcggcggacggcacacgatagtcgtaggcggtaggcggctcgatggcggcattcggatccacgtttaccgtgagggtggccgtatcggacaagccggccttgtctttgaccgtgtaggcgatataggcggtggtggcgctgccgggcgtggtgaaggagatcatattgtctttcacgctcaccccgtcgagaccttggacctcgacatgcttgtcgacggtcagattggtgttgtcgccggagatgtcgttctgcgcgaccggcacggttgcggccgtattgggcctcaacgtgatttcgtcgtccctggcgtatacgccggagtcggacgatccttggaatacgcccacgcggatctgcgcctgtgcgcgctgaccggtccaatcctccacggcataggagaaggtgtcggtgccggacgaatccggatacgcttcatagaccaagtagtcggaaccgacttcggatatgcggcccagcgtgggtgccttgttgcccagacccaacagctgatcgtcgtcgccatccgtgtctatgccggtcagtgtgatggggatgcggaccttctgcccggcggcaacctgcgcttcggcgtcatgcggggttggcgcggccttgctcgctgcgtcgctcttatgcacggtaatggtgatattggcggaagccacattacccagattgtcttcaaccgtataggtgatggggaagttgccggtctcgctggatgcttggtagcggaccgtgtctccagagacgaaggccagacccttgaacgtctccttgtcgtattgcaggttgttcttgagtttgaccgtggtgccatccgagtaggccacatggtcaagcacatccacggacacgatgccgtcggtacgcacctgggcattgatattgctggccttgggcactgaattcgaggtggccagagccggtggctgcaacacgatggtgcccttggcggttccggaggcgttggccacggtgtaggtaagggcgacgggcttcgtgggcacctgacgcgcggtgatatacacgcgcttatggctgacgagaccaaccttgatgccggagtcggccggtgcgctcaccgtggtgacggacagcacaccgcccatcggatcgacgtcattggtgagcggctccacaatggcggtattatccgcgccaagcagggcgacatcgttggcggcaaccggtttggcggcctcgccggtggcaggctgcacctcgactcgagccaatccggtggccggaatcgaaccttgagtaatggtgtagggcacgtaataggtgccgggattggtggccttgaacgtcaacgacatatccgccgcattggtggtcgtcgaagcgccgttgggcgtatccacctgagtcagctgtgccggctgcaaggaagtgccatgcacgtaagaggacagcttgacgacggtatccgtgttgggaacggtggttttcgctaccgggtcgatgaccgcggccaaggtgttcgcgggcttgaccgagaaatacaccatgccggtgccggtcgccgtgccgtcggagacggtgacctcgacgcccacgcgtcccgacgccagcgcaccggtgttgaacgtaagctggccgtcggctcgggtggacacctgcacctggtcggtgttctgggccacagcggagaccagagtgagcgggtctccatccggatcgttgaagctgctcagcgcattggcggtataactggctccctgctccacatcgatctcgggaggagtgtcgaactgtacgggagcgtggttgcctccatcattcagggttacggtcaccgtggcggaagaggtctggccgcgaccatcggaaatatcgtaagtaaaggtaacggtgcctgcggatgcggcggaggcatcgagttgcagataccggccgtcgtaaatcggcgaaatggtgacgtctttgttgtttggtgcgccaaccttggtgattttcagtacggaacaatcggtctgctcgtcattgcgcagcacgtcgagaatctgttccgaaccggctcgtgcgccgatttcatcatcctcggctttgatttggccggattgtgcggaacaggtcttggagaagtcgtggtggttgttggccgagtcgttgttctgctgttctttctcggtctgctcggtctgtattttgttccactgtattttgatgactttggtggaatcctcagggttccacacattgccgttaaccgtgtcgttgagcaccacaaggcgatggttggtgcggaacaccaattcggaagtagtgttgacggattcgagggtttgcggcttgacgctggtatccgtgggggagcaggcgcgaatgtagttgctggccttctggctccaagccgagtacacgcagcccttggacgataccggtcgtgccggattcgccttgcccccgttggctatgaaattcgccttggcgttggacttcaacgggataagcgcaaggcctctcggtgatgccgcggccacccaatcggactgtacgtcatcggtgggaggctcctgaagggtgagggtgccggtcgtgtcgacatcgacgcggccgcccttgaatatgacggttttgccggttgcgattaccggcgtgctcccgatgacggtaaagctttcaacggtctgctgcttgccgtcggtcagcgattcgagggttttgacgttggcgctgctgggattgtcaagacgcagcaccataccgtcggatggacggtatccgtagactttgccatcgtgggttactgcgatgcgcccgccctcgcccagctttattttcggatcggaagtggtgggggtcacggaatcaaggttttccgacaagccggtccacacattgccggtcttctcgttgatcagggctgcggtatccccgccgaccacagtggtggtgctggctttgatgtcggtcttgacaccggtgctgaccgtggatgccttgatggtggaggctttggtcgtttcggtcaggatggtgtcgccattatgctgtgcgatgtcgaatcgtggggcggaggaggagacgccggcgtcggcctccttgttctttacgttgaatcgtgcggccttctggtttttcagcgaagtgacccatacggtgccatcgtccagttgcacatggcggcgcgtgacggtgctcatgatcaccgcgccggcaacaagtcccagaagcagcaggagcgtgattacgggaaccgtccacgtatgcccttcggagggcataaggcggcgcaaagccgcgctgatgcgtcggcgacgatcgtatgactgggacgatgtggccatctgaactccctgacccctgttttctctggttgctggtgtaatgacaacgctttacggttccgatacctgccgttcctgttgtccatttggtgaattcgccgctgctgggcgcacgtctgatgcgatacgcaatgccaaggtggcatgcccggcagtggcgagcggatcattcttgcggcttggccgcacaggcgatggcggggctgacggacatctggcggttcttgcgcacaatggacacctgaatgcaggtctgcgagccttcctgcgcgttgacggtcaccgtgggatctgacgttgtgacggtttgcgcgctctggtcggtattgctgccctgcactatggcccacgcataggtatcaccgctttgcgggtctggattcgtccaggtgaacgtcacggatgacccatccgccgcataggtgccgttcagattctccggggaaggaatctgggcgttcgcggtatcggtgatcacgtcatcctgattattgcggttgttgtcatcatccttggtgccgggcgtcgccacctgtttggtatctgatccggtggcgctgtccatgcggggaacgaccacgaaggcgaatatcagtgccgctgcggtgatcgccgcaagtataccgacggtaatacccaccggtttgacccatcgccgtgacgaacgggtgatctgatctcgctggtccgtggcccggcgccgacgctcgatgtctttgggataggccggcatcccttccacggtaacgggagtggcatgcccgaaatatgcgaattgcacacgctgcatggcacgtgcgaactccaacgcggagtagtaccgctggtcggggtccttgttcagggcccggcgcagcaccgcttccacatcggccggcacgtcggggcggttgaggcgaggcaatggctggttgacgatcagcgaaatcagttccgattgcgaacgcgggtgataatcgtgctggaatggcgagcagccgacgaacatggcgtacagggtggccgccagtgaatagatgtcggcggcttccgaaccattggtcagatgctgaagcacctcaggcggtgcccacggcggcgagaatccggtttcggtgcggtcatacacatcggtggagataccgaaatcacccagaacaggcaagccctgcgaggtgatgagaatgttgctgggcttgatgtcgtgatggatgatattgctgcgatgcgcggtgaacagcgcgcttgacagcttgatgccgaggtcgagtacctgctcgcaggtcatggaccgggccttcatgatgctgttgtaggtgccgcccggcgcatattcgatgacgatgtagccatggccatcggaggtgacgccggcaccatataccggcagaatgtacgggtgggatgacagcttggccatgaagttggcctcgcggttgaacagggcagcggcccgtgggtcaagggttttggcgctggcctttaccgccaccgggcgtgcgggcatacgctggttatataggtacaccgtggcggtggcaccgcttcccaacatctggacgaaatcatatccgggcagcttcggcggtctcatcggaatgttgtccatctgttccctccctccttggaaaatgcgctctccctgcattcgttctacaggataccgtcaagggtacgattcttcgtcgggttcggtaaaatttttccctctgtgacggtcgggtttaggctggagccatgatgacgagacttgaacctggaacagtgctggacggcatcgaccgtgatggagcggcgaggctgattgtcggcacgcctggaagcggcaaaactgaattcgccttatcggtgttgatggcggggctgcgccgctacggtggcacgcaggcggtgatggccgtatccggccgtgtggccgccgacgcattgggcaatcgggtgattcgtgagctcgggttttccgtgcaggccaggccggtcaccacgctgggtgccgtggcattccgggccatatcggcttcgcgcgagggaactggattgccgtcgcctcgattgctgaacggtgcggaacaggatgctttgctgcgtcaagtcatggccgtgcatctgcgccatgccgtagcgggagatgattgcggcacctgtgatttgctgcgcgtctactttgcccaggatgactgggcgagactcatacgcgatgccggtgccggcgagatgcccggctcggccgcttccgcacaatcaagcctctcgcaacaagggtcggattcgccgtctccgacgtcggcaggcggctcgaccagcgcggataggttcacgcgaggtatttcagatgcgtttatcagccagttgcgcgatatgctggcccgattggatgagctcggtgtaggcgttcacgaagagccacgtctcttggacgccgtgacggaggacgcgcgattgtcggtgcaatggcgtttggctttcgcgttgcgccgtgaatatattgcagcccaaagcgcggtatatccggggcaataccgtttggatgcctcgtatttgctggtggcaggcgctcgtgtggtgcgtgaggcattcgccgccgatcacgcggatgattccgaccggcctatgtgtgtggaggcgttgggcttgccccggctgctggttgtggatgatgttcaagacaccacgctggccggcatgcgcttcttggaggagttggggaatgccggcgtcaagttggtgctggtcggcaacccggatgaatcggtgcagaccttccgtggatcgtatccggaatatctgatgcgccgtgccgtggaagggcggctgaaggccaaggaagaacagctggttggcggcagtgccgtcgctgatcagtcgcacatgacgatggctgatgtgatcgcgtctcgtatttcgctgtcgattccctcgccggaagacgagccgctgcctccggccgagcgtcccggcaagctgaccgccatactgggcggagtcgatgcagcgaattatcaggcggacggcacggtgaccgccggcctgtaccgatcctcacgtgaggagctggatgatgtggtctggcgcatcaagcgggcgcatcttgaccggcatattcggtggaacgacatggcggtcatcacccacgacaatgccgccgtgcggctgttcggcgaacgactgcgccgagatggtgtaccggtgcggtattcgtcggtcacccgtcctttgaaggacgagactttcgtgcagggattgttcgcgcttgtggagcttgcccgattgcgtgccgaggggatggcggaatgccagatgacgttggcttcctgcgcggcatatataaggactagagtggccacgttgatgaacggcccgttggtgagtgccggggccaaacccggtcaggggcgtcccacaaggcttgcgccgatcgaatcggccatggggtcgttggagtcgctggcgcatctcgccacggatgatgccatgctgacctctctgacgacggcatgggaaacattgcgtgaaacataccatgaaacacggcgtgaaacaggtcgtgaaacatcctcgtcagtggtttcgacgtcagcggtttcgtcgtcagtgacttcgttgccagtgtctgtcgaaatactcggtgaaccgtccggcgatgacttggcctttggcgttgacgcgctgtacgtgatgcttgccattgatgatgccgccgcgccggcgcaggctgcgctcgcatccatccacgcggtgctcggcaacgaccctcaggcccgcgcttttgcgaacctgtggcatctggtgggcagcgttgcttccggcttggagcggctgccggcaagccagcgcgtacagccgcgctatgcgctgtctgttgcgtggaacgccaccggtctggcaccggtctggcagcgtgcggcattattcaacacggcagaggggcgtacggccaatgaccggctggacgcggcaatgcgcctgttccagttcgccgatgattccaccgccagtcgagacatcacgtcattcatggcacaggttcggggcatggaagtgcaggccgattccttggcccacataggaccggtggaagacgcggtgacattgactacgccggcaggcgcggccggacgccactgggaatatgcgtggataccggtggtccagcaagacgtgtggccgaacctcgccgggcgcaacaccatgttcggtggtgaagaccttgccgagctcgtgctgaggggagcgcttgaagaaagcgacaaaaccgagcatgatccgcggttcgcggctgtattgtcgggcgagaagaagagtttcctggtcgcgctgacccgtgcacggcgaatcatgatcagcgcggtatggaacgacagcatgagcccctcggactttctcttcgggtatctgccggaatactatccgcgcaaccggcaacaggcgcctttcaccacagtgggggcacatgcgggattcgccgaatatgatctggccggattggacgccgacccacgtgggttggtcagcgccgcccgcgcggttctggccactgctcaaccgcagcaggctgccgcaaaggacgccgcgattgcgttgacactcctgttagagcatggtgtgcgcgccgcaaatccgcagagctgggcgtttgtggaatcgccggcccaatcggatagcgcgtcatctggcggtgcgtcatctggcggtgcgtcatctggcgatacctcatctgacagtgcctcatccgacagcgcgtcatctggtggtgtacagcctgacggtatccaaacagggaaaggcaagacggatgcgcaggccgcgcccatggtcaccttatctccatcggcggtcgacagcctatgggcgtgcccggtgtgctggatgctggagaaccggttcgccggtcctcgccccagctccgtggccaccagtttcggaaccctcatccatgcggttgcgcagcaaggcagcgaggaagggctggaccatctttcccacaatgcccaggcgttggccgcactgggcttggactccacggccggcgcggaacgtcgcatcgaggctgtctcggcacggcttaatgccatctatcagagcaaacgtcctgatccgaatgccatagccgacacccggaaccgctatgaggccacccgtaaggacgagtccgcggcggataccctgcgcaacatcgccgattactttgtgcgcagcgacgccgatccggaaacgtatcttggcaagaactccagcaacttcagcattggcgcattggccggtgccgaatgcgaacgggagtttgccgcacgattcgatgtgcgtgacatactcgacgcatacaatgccgtgcccggcctgcacccaatcggtcggaacacgctggtccgtctgatgggagcactggtcggagggtggccggaaggcatggacgagcatctgaccgtgagactgtccgggcgcatcgaccgtatggaaacccgcgtactcgcagacggcggcgaatgcattcgcctcattgactacaaaacaggcagaacgcccacggtcaaacagattttcaatgatttgcagctcgtgtgctatcagcttggcctcgtgttccccgaagacgggccgcgcggtgccaaggcacttgccgcaatgccgcatatcagccaaagcgtgctattccatgtcgggcagaatgcggcaccagccagaagctacgctccggaaggtgccttccagccgccgctgttcactgatggctcgttgaatgccgaaccgttcacgccccgatactggtataaagaccccaaccgtttcttcgacatacccgccatagatccggctactcctcccgaaggtgtgagtgccgaagcgtgggcgcaattcgccgcgctcgccggtacgcagacgttatggtcgctgaccatgatcgcccgcgtattctatgccgcggcggccagcagatcagccatcatcgaggcccatccgcaagacacccatatcggattctgccgtatgaagaacgtctgccctgcctgtgcaggccagatcgacacgattttcgaaacgaggcaagcatgagcacgttcactcccagtgcggaacaggccgccatcatcgatgcgccagtcgatgctgacgtattggtggttgccggtgccggttccggcaaaacctttacgatgacccaacgcatcatcgcgcttatcaatcgaggtgtggcacctgaacgcatccttggcctgaccttcacacgcaaggccgcaggcgaactgctggaacgcgtctccgccgcagtggccggtgatatggcgggctctacgaccgccacggtgtctgatcgggcattcctcaagccggccattttcacgtatgacgccttcttccagaccatcgtgcgccaatatggactgcttgtcggattcgatcagaacacgcaaccattgagcgcagccggagcgcttcaactggccaccgaagtcatcgacagtcacatggatctggcgttcagtgaggattttggcgccttctccagtttggcgaaccgtgttctggcgttgtcggatgccattggcagtgccatgatcggtgccggctgcaccagcttcgatgatgcgatcaatcgagtacggcaatgggattcggcattcatcaatcgattgcaacaagccgttgcagacgaacccatgcccgaggacgagccgaaaatccccaagatcaaacgactgaagaaagataccgacgccagctggcaagccaagctcgatgaccgtgccgaacatttgcacgcccgctgcacctatcattgcggtgcgctgctggagaccacacgcaaacgcgatattctgctccagctggtggaggcctatgcccaagccaagcgggaacgcaatatggccgaattctccgacttcaccattgccgcgtatcagcttatcgagcgcttcccctccatcggagagcgtacgcgccgcaggtacagccacgtgctgctcgacgaatatcaggacacctccaccacgcaggccgctctgctggcagcactgttccacgtggatgcgtcacagaggtccgccgtcaacgcggtgggtgatccgttccagtcgatttacgcatggcgtggtgccagccctggtgcattccgtatgttccagcaagatttccacctgtctgccggatacaagccattcccgctgtccgtcaccaggcgaaacagccgtatagtgctcgaagccgccaataatctcacgctgccgttgcgctccaatccgtcgcgtccttccagctcattgatgcgtgaggtcgatgtctcatcgctcgaccccatgcctgatgcccccgaaggaacattgggagtactgggcttcgccacggccgggcaggagatcgacgccgtagtgcgtttctgcaagacggccatcgcacggcaccgttccgcagccgaacaacaggaacagatgccgggcgaacagaaagcgccggtcgccgtgctgtttcggtccaaatcacatatgcccgaatatcaggcggcattggaacaggccggattgaccacattcgtggtcggctattccgcgctgttggaacgtccggaaatccgcgatctgatggcgttgctgcacgtggccgccgaccacaccgatacgggatcgctgatgcgcttgctggccacgccacgattcaccatgtccgcagcggatttgaccatgttggcccgttttgctgaagaacagaacacggaacaacgcttccaagcattggtgcaggccggccttgcccaaccggatacaccagcgaatgaatgggcggctgtggtgcgtgagtaccgcgatcaggtggccaatgcggtattcctgccagacgtattgctacgcggcgacctggtaaaactgcttgaacggttgagcgcacacgggcgcaacgccataacccgggccgcggtgatgctccgtcaggtgcatgatgccgtcgggcggccactgggcgacgtgattcgcgccggcatagaagcgttggatcttgacatcgacaccgtattggccggtgtgctgcataatccgcagcaccgcgccaatcccgctttggcgcatatgcctatggatgcgattgtggatttggtggatacgtacacgcaagagattgccgctgagcaaactccctcgttgcatgggttcatcacatgggtggatcatctggcttcggtggaggatgaagccgccagtctccctgacgctccggtggatgtggaactgatgaccgtacaccagtccaaagggttggaatgggatgccgttgcggtagtggggcttaccgccgtcggattccccagcaatcagggcgaccatctcaagatcgtgctggacgagcaccatacgggaggcaccgagcaaggtcactggaccgcacccgaatatcatgagaccgccgactcctggctcaccaaccccaccgccgtacccgtgcctatgcgtgccgatgccggcattctgccgcgattcccccatgatgccgatgtggaagccgaccccatcgcatcgttggcggctttggatgatgtggagcttattgatgatgaagtgttcggctccatgcgcgaattcggcgatggcgtggaagaagtggatgcatccggctggtatttgacgcaggcggaggaatatgggcgccggctgcatgccgacgaacgtcgattgatgtatgtggcgcttacccgtgcgcgagaagatgccctgatgacctattgcgcctatacgggcgaatccgggcgggacccgtcagtggtgcccaaaggctctcgcgccgctcagccatccaatttctggcttgaagtgcatgacgcgctccaagcccgtgaacatgcgatatcggctcaggactgtgtggaacggctgcaagccgccaatgccgggaagcctatgctgatctcggcgcaaggcgaagcgattgccactcccgaagggttctttatcggagagcatgccgcggcatacggtgacgccgtggtgggggaggcatggcagacgccgattacgcagacggatgccgctgtcgaattgccgtggccggctaccctcagcgacgcagtgcatgaacagctgtcacgtggcatcgatgttatcgccgcagattcctcgtcacttgagcagcaccaagacgccggtccactgctgcaacgggcgcaattgctggtggacgacgccgatttgatggccgatgccgccagcggccagtcgcttgatgaggcagtcaaagccaaggcgcaacgcattctggccgtcggacgtcagaacgtgacaagcctgcaagcccgcgtaggtggcatgagcgaacgggaggagcgcctctactggcgtagcattatccgtccgattccacgaatatcgtctccggcggccgaagccggcacgcagttccatgcgtgggctgagcaattcatcaatgccggtaagccggatgaagcggtactggcatatgaagccgaatcaagtatgccgcatacaggtcaggatgcgggattcgtttcccgggaagccatgttggccgatttggccgaacgggagcggcaatgccgcaagccatccacacggcagcccgctgtcccacagcccacggctcaacaatccgcatccgccgtatccgccgcctccgccacttccataagtagcgacaatgccaccgagtccaagctggtggcgtggcagcgcagactggccgaatcatcgtgggccaagcgcatcccggcgtggacggagcgtgccattgtcgtggacgtgccgggcgtgggcctagtcaatggcaaactcgatgcggtattcatcggtggacttgacccgtccagcaccaccgcacgctttaccgtggtcgactggaaaaccggtcgtcggcccaccaagccagacgacatcacccgcaaacttgcccagctcgacatgtaccgactgctgctggcagcggtcgaaggtgtggaattggacagtatcgacgccactctctactatgtcagtgagcccgacgagggcttgcgcgagcttcacgcccgtgcgaaaaccaaacaggaaatccttaccgagttgagctccggcattcccgaacaatctgacaacgactgagcccaaaggctcatgacctgtacagcatcggacggccttcaccggtggagagaccttatgcatcgcaaggcatctccgacgatgaggacgactggccacgtaccggtccgcggttgaaacgcaccgcgtgacgttgctggggaaccgctaccctcggatggcacgtgtgggcgggcgcacgtgccggacaacgcaccagtaaggagttattgtgtccacgactcgcgcggtttcgaagtcgtccgctgcccactcgccctatcagcgcctgttcatgctgcccggagccaaggcgttctgcctgtccggtgcggtggcacgattgccgatttccatgatgagtctcggcatcgttctggcgctcaaccatctctacgacaattggaccatcgccggcaccatgagcgccgcctatgtgctggccatgagctgcgtcaccccgttctacgcccgcgccttcgaccgtttcggccaagcccgcgtgggccggcttgcgctcgccgtgcagatcgtggccatgctcgccttcgccttcgcggcgttggtgcgcgtgccgattccgctgctgttcgccctggccatcatcatgggtctgacgcagttctcattcggcgcattggtccgaacccgttggtcctatgcgttgcgcggtgtggaagatggcgaacagctgctcaacacggcctacgccatggaagccgccattgacgagatcgtctttattctggggccgattctggcggcttggctggccacctccgtgcatccggtatcccaactgtttgtgcccaccgtggcatgcggcatcggcggcaccatattcttctcgctgaaatccacccagccgccggtcatcgtggaacaggtcagcgtggccgcgcacgatgacggcagccccgctgcaagcgaagatgccgaccagctgaccctgcgccaactcaaacgcagcggtgccaagcccaagagtgtattgctctatgccggcgtactgccgttgctcgccgtgttcatcgtgttcaatatgagcttcacgtccttcgacgtgtccattaccgccaccatgaaatccatgggacttgagcccttcctcggtctgcaattggcgatgttcgcggtcggctcgtgcatcggcgcgctggtgttcggctcttgccaactcaaaggctcccattgggcgcatatggtgatgttcctgtcgctgctgaccgtcggctacgtgttcttccggttgtcaatggacaatctcatcctgctgggcgtcttcgaaatcctcgccggcctgaccgtctcgccgacgttcgccaccggcaacctcatcgtcaaggatctggtgccggcggaatccctgaccgaaggactgagctgggtaaccaccgcaggcacggtcggcacgtcgatcggctcgtccgtggccggcattgtgcttgacgcctccaaccctcatgtgggcatgatgctgccattcatcttcacgctggcgtccgtgccattggcgttggccggatgggccttggccaagcggcgtgggtgaaacgggatcgggctacgcccgatggatggttggcggcctcgccggggtctctccctcatcagagggagctggacttcacggttcggctcgtcagagggagcttgattctgtggacggggtattggcgtgagggcttggcggtgataggctgattgccgattggaaaacgtcccgggtgcattgccgggcaggtacgggtagacagggaagaagacatgatcaaggtttcggtggtcggagcaaagggccgcatgggctcgcacgtggtcgaagcggtgaacaacgccgaggatacgcagctggcgctcgcattggatgccggcgacgacctgacccagatcaccaccgacaacaccgatgtggtcgtcgaattcaccgtgccgtccgtcagcctgaacaacgtgctgaccctgatcggccaaggcgtggacgtggtggtcggcaccaccggctggaccgacgagaaactcgcccaggtcaaatccgccatcgccaacggtccgaagcccgaaacccagaaggtcttcatcgcacctaacttcgcgatctccgccgtactggccgactactttgccaccaaggccgcgaaatacttcgaatccgccgaagtcatcgaactgcaccaccccaccaaggtggacgccccctccggcactgccatccacaccgcccacggcatcgccgaagcgcgcaaggccgcaggactcgcccccgtgccggacgccaccgaaaccgatggcggctcacgcggccaggtggtcgacggcatccacgtgcacgccgtgcgtctgcgcggcctcaacgcccacgaggaagtgctcttcggcaacgccggcgagcagctgaccattcgggccgacagcttcgaccgcaccagcttcatgcccggcgtcctgcttgccgtgcgcaagctcgccggcgacgctccggctggcctgaccatcggcctcgaccacttcctcgacctgtaatcgacccgcagtcgaccagtagttgcccccgcatttcaggcagggaagcgcgccgggacgcgcatcacggcattgccaccggctccggccataatgccacgcattcagcaacaatcaaggtacgtagtataagagtccacaatgggaagtacggtaaacactatgagcgagcatgacatgcaccttcttgattcagcacctttcggccgcattctgccggctatggtcaccccgatgaaatccgacggcagcgtcgatttcgccgccgcgcagaagctcgccaaatacctcgtcgccgatggcgcggatggtctggtggtcaatggcaccaccggcgaatcgcccgtcacccatatggatgagaaggtcgagctggtcagggccgtcaaggaggtcgtcgacgttccggtgatttccggcgccggctccaacgacaccgcacacaccgtgcgtatggtcgaacagactcaggaagcgggtgccgacgcggtgctcgtcgtcatgccttactattcccgcccctcgcaggacggtatcgtcggccactacaaggccgtcgacgaatccgccgaaaagccgatcatcgtctacgatgttcccggccgtaccggcttgaaggtcaaggtcggaacctacgaccgactggccgaacttgaacacgtcaaggctgtcaaggacgccaccggcgatcttgcagccgcagtggagaagcagcagcgcaccggcctcgcctggtattccggcgatgacggcctgttcctgccgttcctctccatcggtgccgtcggcatcatttcggtgattgcccacgtcgcctccaaccccatgcagcagcttgtccaggcattcgatcgcggcgatatcactaccgcccgtcgcctcgccaaccagctcgccccccttgtccacgcgttgaatggcgacggctatcaggccgtcatggccaaggctgcgctcaaggtcaagggcgttatcccctccaccaccatgcgtctgccgaacatcggtcccgacgccactcagcttgacaaggctgaagagggcatgcgcgctgccggactgctgtaagcccgaaacgctgcatacgggttgccagcccgccgcccctgcatgacagagcagaggcaccacaacagaaatcccaaaaaggttatggcacaagaacaaaagaaaacaagcaagaacacgaattctcgccgtcgcggttccgcgcgcggccgcaacgccaacggatccaacagccgtacgccgtcccgtaagatcaacgccacccggcaggccaccgcaccccagcaggatgccgtgctgatcgccccgccgaagtaccgcaagggctccatgcgcatcacgccgctcggcggcttgggtgaaatcggccgcaacatgaacgtgatcgaatacaacggtcacctgctgctcatcgactgcggcgtgctcttccccgaggaggagcagccgggcgtggatctcatcctgcccgatttcagctacatcaagaaccgtctcgacaaggtcgacgccctggtgctcacccacggccacgaggaccacatcggcggcgtgccctacctgctcaagctgcgcccggacatcccgctgatcggctccaagctgaccctcgccttcgtggacgccaagtgcaaggaacaccaccagaaccccaccaaggttgaggtttccggccgtgagaagctcaaggtgggccccttcgacctcgaattcgtcaacgtcacccactccatcccggacgccctggctgtctatgtcaagaccccggccggctccctgatcgacacgggcgatatcaagctcgaccagctgccgctcgaccaccgcatcaccgacctcgtcgaattcggcaagatcggcgaaaagggcgtggacctgctgatgatggactccaccaacgccgaggtgcccggcttcgttaagcccgagacctccatcggcccggcccttgaccaagcgttcgcccaggccacccgcaagatcatcgtcgccagcttctcctcccacgtgcaccgtgtgcagcaggtggtggacgccgcccacaagtacggccgcaaggtcgtgttcgtcggccgttcgatggtgcgcaacatgtccatcgccgccgacctcggctacctgcacatccccgaaggcaccgtcgtggacctgaagcaggccaacgacattcaggacgacaagctcgtcttcatgtgcaccggctcccagggcgaaccgatggccgcactcggccgcatcgccgacggcaaccaccgcgatatccacatcaacgagttcgacaccgtgattctcgccagctccctgattccaggcaatgagcacggcgtctacaaggtgatcaacaagctcgtgcagctcggtgccaaggtcgtcaaccgcgacaacgccgccgtgcacgtgtccggccactgcaacgagggcgagctgctgtacatgtacaacatcgtcaagcccaagtgcgccatgccgatccacggcgaaaaccgccatctggtggccaacggcctgatcgccgtcaagaccggcgtggacccgcagaacgtggttttggccgaagacggcgatgtggtcgacctgtaccacggcagggccgcggtcgtcggctccgtgccgtgtggttacgtgtacgtcgatggcgattccgtcggcgagctgaccgatgacgagctggaaaagcgccgcattctcggcaccgagggcttcgtctccgcgttcgtggtggtcgacaccgacaatcacgaggtcgtcaccggcccgaagatctacctgaatgccgtggccgaggacgaaagcgagttcgacaaggttcgtcaccagatcgtcgaacagctcaacgaccagatgatgcagggcacgcgcgacacctacaagctgcagcagaccatgcgccgcacgctcggcagctgggttgcgcgccagctgcaccgcaagccgatgatcgtgcccgtcgtggccgacatcgcccaggacgtcgaaaccgtagaaaccaagtagtccggattatccagggacgaccgtaaggagtaattgaagtcatgcccggttctaatctcactcgtattgaagccgaagaacgtaaggccgttatcgaagcgccgattcactatcacgtcgaccttgacctgacggtcggcgcgaagaacttcggttccaagtcgttcatctgcttcaacgcgaagcctggttcgtcgaccttcctcgacctgatcgccgacgaagtgacctccatcgacctcaacggcaagtccctggacccggccgtggccttccaagacaaccgcatcgaactgaccgacctcaaggagaagaacgaggtcaccgtcgaagccaggtgccgttactccaacactggcgagggcctgcaccgctcggtcgacccgtccgatggcaacatctacctgtactcccagttcgaggtgccggacgctcgccgcgtctacgccgtgttcgaccagcctgacctgaaggccaccttcgacttcaaggtgctcgctcccgccagctggatcgtcacctccaacatgccggttgccaccatcgaggacgatccgcgcgaaaccctcgacggcaccctcggcgacaagccgaacgaaagcacccgtctgtgggacttcgagccgaccccggtgatgagctcctacctgaccgccatctgcgccggcccgtacgccgaatggcacaccgaatacctgaacgaagacggccgtaccgtgccaatggcccagtactgccgacagtcgttggccaaggccttcgcgaaggacgtcgactacctgttcgacatcaccaagaagggcttcgcgttctacgccaagacctggggcgtgccctacccgtacgccaagttcgaccagatctacgttcccgaatacaacgcgggcgcgatggagaacatcggcatggtcaccatccgcgactcctacgtgttcgaatccaaggtgaccgacgcgctggccgagcgtcgtgtggtgaccgtgctgcacgagcttgcgcacatgtggttcggcgactatgtgaccatgaagtggtggaacgacctgtggctcaacgagtccttcgctgaattcacctccacgctggccactgccgaagccaccgaatggcatgacgcttgggccactttctgctccggcgagaagagctgggcgctgcgccaggatcagctgcccaccacgcacccgatcgtcgcgccgatcaacgacctcaacgacacttacgtcaacttcgacggcatcacctacgccaagggcgcctccgtgctgaagcagctggcattctacgtgggccgcacgcagttcttcgaaggtatccacaactacctgaaccgtcacgcctactccaacgccaccctggccgacctgctgagcgaactggaaaagacctccggccgcgatctcaaggcctggagcgccaagtggctggaggaatccggcatcaacacgatcgccactggcctgaccgtaaacgcggacggcaccatcgccgaactgaagctcacccagagcgcgccggccgaacacccggtgctgcgcccgcatcgcctggccgtcggcttctacaacgaagacgccgcaaccggcaagatcgtgcgcaccgagcagttcgaactcgatgtagatggcgaaaccaccatcgtcgaggccgcagccggcaagccgcgcccggcattcgtgctggtcaacgacgatgacctgacctacaccaagattcgtttcgacgccgaatcccaggcattcgccgaagccaacctgcatcgtttcgacgatgccctggcccgcgccgtgacctggctcgccttctgggatatgacccgtgacggcgaattcccggccgaacgcttcgtggacatgaccctgcgtcttctggccacggaaaccgaatccaccaccttccgttacgcgctggcctgcatgggcaccactgcccaccactacgtggcgccagcccgccgcgacgatgtgctgcgccacgtggccgccgagctgtggaccctggccaacgccgccgaagccggctcggacacccagttccagctcgccaccgcctacctgggctatggcgaggagggcgatgccgcattcgtcgccaacgcacacggtctgctggacggcaccgtgcgtcttgaaggcctcgaaatcgacaacaacttcacgtggaccatcgtccaagcgctcacctccgtcaacgagatgaccaacgacgacgtggacgcgcagctcgccaagaaggagaccacggaaaaccgcgagttcgcctacggcgcccgcgcctccatggccacgacgcaagccaaggaatgggcttgggatcaggcactccacaacgacgagctgaccaactcccagctcgaagccgtggcccgtggcttctccgccaccccgcgccccgatctggccgagccgttcgccgccaagtacttcgagactgtggactgggtctgggccaacaagacctaccacatggccgacgccctgctcaacggcctgtacccgggttacgccgatcccgccacgctggtcaagctcggtgacgcctggctggacgagcacattgccgccgacaacgccctgaagcgtctgatcgtcgaaaacgtggcatcctcccaccgcaccctcaaggttcgcgaatacaacgaagcgctctgatttccttctggctcccctcgggtgcgaggggagttgggcgggttctagtgatcgttgcaacacctgacctaccgcaaggagggtcaggtgaccagaagccaccgaaacgaagaccgtggcggggaacaccgttggacgttcaacggcgtcgaatatccgacgaggaagctgatgtgcgaggcgagacgcgccgagtacgtgcgcctgctggacgaggaaggcatgaacttcacccaggccgcgcacgcggtcggcgtctcgaaacgcaccggcaaggcgtggcgcaacggcaggacgcgcgccacgggaaggaacgagaaacccctggtggactggtatcgttccaccatggacaaacccaagaccctccatccgcgatacctgagccaggaggagcgcatccagatcgcggaccgtctgcgtctgggcgattcgatccgcgccatcgcccgcctgctgggccgcgaccccggcacggtcagccgcgaggtcgagcgcaacaggaatcccgagtccggcggttacgagccttaccgcgcccagcagaaggccgcggaccggctcaaacgccccaaaccgcgcaaggcggccgagggcacgcgactgtgggacgagatcgccgccgggttgcgcaggcattggagcccggagcagatagccaaccggctgaggctggacttcccggataatggggatatgcacgcgagcgtcgagacgatctaccaggccatctacctgcaggccaggggcgaactcaagcaggagctgaaacgcgccatgaggcaggggcgaaccgcccgcagaccccaaggcggccaaggccgcaaaccccgtttccgcgaacccatggccatgatctcggagcgacccccggagatcgaggaccgggcggtcccgggccactgggagggcgatctcatcaccggcagccgcaacaaaagcgccatcggcacgctcgtcgagcgcaccaccaggttcacgatcctgctgcacctgcccgacgggcacgacgccgaacacgtccagcaggccatcatcgacaagatgcagcacctgcccaaactcctgcgcaacagcctgacctgggaccagggagcggaactcgccctgcacaaacggatcggcgcctcgctggacatggccgtctacttctgcgacccgcactccccgtggcagcgcggcaccaacgagaacaccaacgggctcctgcgccagtacttccccaaaggcaccgacctatccgtctacccggaggactacctcgacgcggtcgccgaggaactcaacgaccggccacgcaaaaccctcgggttcatgaaaccaagcgagaagatcatcgaactgctcgacgccgcgtgataacctcaacaaccgacaacgtgaccatggaaggccgctcaaacctcaggtgttgcaaccaccactagaatctgccttgtcgcctcaggcgactgaggggaatcgcttccgcgaggagctacgtccacattccaacataaaacccgcaaccaatcctcaacagcgtattctcgctcaaggccggcaatgtgccggtcgatgagcgacaaggatacggggaatgattgcgggcttttccataacttcattactgctgattctgttggccggaatcggcgcaggattcgtgggctatgcggtaggcgcatcgtcactggtctcatacccggccctgctcgcgttcggcattccgcctgtattggcaaacgcttctaacaccgttggcgtggtcggcacgggcatcggtggcgtgatgggtgcgcgcaaagaactcaaaggccaagcggtacgctccattacgtatgtggtcatcggcgcattcggcggggtggccggtgcgtttctgttgctcaaactcgacccgagtgtctttgaatttgccgcaccagtgctgattttgctgagctcgctgatcatcgccatcaatccgcgcggccgcatgcaggccaagcaagccgccgcggatgccaccgcgcaactcaagcacatcgaagccactgaagccactgaagccactgaagccactgaagccgccaagcgcgcaaccacccctaccgcacctcaccgcccgccggaacaactcgtgcagcccatgagtcaggattcctggtgggtatggctgggcgtagcggcggtcgccatctactccggctacttcggcgcgggcgccggtaccttggctctcgccgtgcttgatgccgccaaaatcggcccattccacaagatcaatgcattgaaaaccctgatcggcacaggcgcgaacatcagcgcctcagtggtattcatcatccaaggcgcggtcgattggccggccgccatcatgctgtgcgtcggatgcttcatcggcgggtacatcgccccgtccatcacccgcaagattcccgcaaacatcatgcgcgccgccgccgtaatcgccggcatcattcttaccatcgatctggggctcaaaacctattgattcgtgccttacactgatgcagtgaagcatacagcatggccgtcaaccgcagcgtggtcgcagaccccgataaggtggccaatgtctggcatttggcgactgcggaacctgagcgcctagaaaccagcgcggcaggcgaagcggtgaacgacttcctcgatccgccagacacgtcgcagattcacggcattgcgtgtcatgctgattggcggttcgcggcgcgagcaggtgctgttcgccggcgttatgaaggagctactcgcgcccatcaacaatccgcgatatgtcatcatcggtaaggaatggggcgtgcgcgcttactgcgtgagcttcccctgcccgtccgtatttgcccgccgccagcaggacgccgagatactgagccggcagttggaccgctgcctgacgcattgcaccatggtatacgcccgcactgaggaaggtcggcatacgctacttcgctgccaaacgcgttctttcctcaaccgcgacgagcaactgccgcacatactgaccacaacatcggagtaatagatcgttgcattcatggccgagaccaccccggtagaggagatgccgttgggcatgttcatcgcatggctcagcgtgttcctcgccgtcgttctgtttggtgttgctttgccggttatcgatgtacgctgggtagttccgttcgtcgtatttgccgctgtattgtttacaggcgcgtttgccggcccgttcttactagtgcgatggcttcgttcccgtgccggagtgcatcggtccgcccggcatgcccgctaacgaatgtatctcatcattcatccgccgaacaagatgaatatgcgggtttgtgggtgatgccattgcggctgttgaatgctgatttccggttctggagcagattccgtggcggttttttgccgagtcgggtcctagggtggagcacaacgactacgatggtgcgggtaacgcgatacaaggagtggaacttcatatgccgaagatgtttggaaccgatggtgttcgaggactggccaatagggatttgaccgcacgtctggcgttggatttgggcgatgccgccgtgcgtgtgctcggcgacgccggcacccaagacgatcagcctgaggggcgccgccgcgcgctcgtgggtcgtgacacccgtgtgtccggcgattttctggcttccgccctgtctgcgggcatggccgccggcggattcgacgtgatcgacgcaggcatcatcccgaccccgggcatcgcgttcctgaccagcgtgctcaacgttgagatgggtgccgtgatctccgcctcccacaacccgatgcccgacaacggcatcaagttcttcgcacgcggcggcttcaagctgcccgaccagaaggaagacgacatcgaggccgtgctcggccaggactgggaccgcccgaccggtgccggcgtgggccgcgtgagccacgaccagaccactgccaccaacctgtacatcgatcatctggtggccaccatcgctccgctgaacgatgacaaaacccagcccaagccgctcaagggactgaagatcgtggccgactgcgccaacggcgccacttccgtggtggctcccgaagccctgcgccgtgccggtgcggatgtaatcgtgatcaacgcctcgccggacggctacaacatcaacaagaacgccggttccacccaccccgagcagctgcaggccatggtcaaggccaccgatgccgtgatgggcgtggccttcgacggcgacgccgaccgttgtctcgccgtggacgaagacggcaacatgatcaacggcgaccagatcatgggcattctggcccgcgccaagcagcgcgaaggcaagctcaaccacgacaccctcgtggtcaccgtgatgagcaacctcggtctgaagctcgccctgaaagatatgggcatcaagaccgtggaaaccgccgtgggcgatcgttacgtgcttgaggaaatgctcaagggcgattactcgctcggcggcgagcagtccggccacgtgatcaaccgcgaattcgccaccaccggcgacggcaccctgaccgcactgaccctgtgcaacgaggtcgtcaagtccggcaagagcctgaaggagctcgccgccgacttcccgcagctgccgcagaccctcatcaacgtgccgaacgtggacaagaaggccgcctccaccaacaagcgcatccaggatgccgtggcccgcgaggaggaactgctgggagacaccggccgtgtgctgctgcgcccctccggcaccgaaccgctcgtgcgcgtgatggccgaggccgccacccaagcctacgccgacgaagtctgcacccgcctcgccaagatcgtcgccgaagaactcgcgctgtagcacccttccctaaggaaaaaacaatgtttggaaagaacgccaaagtcgacctcgaactcaaccgtgatgtcgaacaactcatcaaaaccggcggcaaggagaagcttctgcccatcgtgcaggccggcgaaccggtgttgcgccaacggacagtggcctataatggccagctttccaagcgtacgctcgccaaactcatcgatacgatgcacaccaccatgctggaggcacccggcgtggggctcgccgccacccagatcggcttggggctcgcgctcgccgtggtcgaagaccacgtgcgcgacgacgaggatgatccgcgcgaaatcgcggaattccccttccacgtgatcatcaacccgagctacaaacccaccagcgacaaaaccgcctcgttctacgagggctgcctgagcttcgacggataccaagctgtgcgcaagcgttggctcgacatcaccgccgaatgggatgatgaagacggcaaacaccacagcgagccgctgcacggctggcccgcacgcatcttccagcacgaaaccgatcatttgagcggcgagctgtatatcgatcgcgccgaaatccgttcgctgaccaccaacgagaacctcgaggactactggtgcgaagacccggtgcccaccgaggccgctgaagagctcggtttcgcactatgaccgaccgtgcatggttcgacgccgccaagggagacattccccaatgggcggcgtccatgcccaaggacgccgatggcaccaccatcgactgggactgggtgcgttctctggacctggcgcatggcgtcggcacaataccggaatccaccccacagtccatccacgacgcattgaaggtcgactacgccacacgcgagcgtctggaatcgatcatcgcccaatgcaacagcgcattcatgaccgatttcgaccggttcatcggctcctatcgtctgcctcgcgcgctcgcctacgccaatcgtcggctcaacgacaacatcaacacgctgttgcatctgggcgaacagcaacacctatgggcggtcagtcgcgaacggcgggggagggccaccattgccgtgctcaagccgtactccggcagcggcccgtcgaacgatgaccaaggcatgctggatctgagcggcgaaaccggtggcgcatctgccggaaacactgccgccgaaaacagcgatgtcaagttccccacaacagtcgccttggacgatatccaagatcgtacggcggcgattcttgacgcacgcgccgaacggcgtaaggcccagcgcttccagaagcgtgcgggcgatgcggcgatggcccgcgccaatctctccggcgcgacttcgccgggtggtgccgctctgccgggtggtgccgccgcgtctggcaacgctaccggacaccatcacaagcccgactggcgcgacgcctacctgcccggccgcgacgtggatgcggtgatgggcatcgacatcgaaaccaccggcatcgatccggcgcgtgactacatcatcgacgtcggcttcgaattcatgaacatggccagtccgcgcccggccggcgaacccgagacatacgcctatgagcagggctattacgccgccggcgacgcctacggccagtcccgcctcgcttttggcgtgccgccggaaaacgcggcgctcggcaacgtcctcatcgccaaactcaccggcatcgatgtacgcggccgcagcagcgaggccgggtaccgactcttcgacgaatggccccaagcccaggccggcctgctcgcgcggcttacccagcagccgtacgtggcgcataacgccaccttcgaacatagctggttcatgctgaacgtcgccggatacgcggaaagctaccgcgccgggcgcatcaccatcatcgataccctgccgatgagccggcagtgggaccccggcgcggtacccaccaacgagcatccttacggagacaacacgctcgacgcctacgccaaacgtcagggcgcgcttgattccgcccacaacgaacgccacctgggccttgaggattcgcacatcatgctggtggccatgaaacaccatctggcggcgctgaaagcgcaagggaaagggccgtgggggtccaccggcagggcgggcgtcggcggcaagtcctgcggtcgtaagcggtgagtacactattggtctcgtgagtaactatcaggacagccgacagcagcgtgagaaccgccgccgcaccatcgtgcgtgtggtgtgcgtggtcatagctgtggccatgctcggctccctggtcatcccggcgatttacgcggggctttgacgttgccttcgcatattcgtgcccgcagttgaacacgtctgatgcgagggatttgtgaggtcgcccggccggttatcggcaaggcaggcccggaaccttctgacagcatggattgcaggcggatgcgcgtgtggcgcggcaatgcccgccaacgccagaggaatgtgcgaaggctgtcaacaaggacgtgacttcccaaggaatctcaaagaatcaacagtaaggtaaaccacgatggcagaatttgactttacccaggcgatcggcgaagcccgcgccaaatacgaatccatcgccaaggcgctggacgtcgaccgactcaaggccgatatcaaggatctcgaaacgcaggccgcggccccgggcctgtgggatgacccggaaaacgcccagaagatcaccagccggctgtccgccgcggaatcgcagctgaagcgtctgaactccgcctcccagcgcatcgacgatgtggaaacgctcgtcgaactcggccacgaggagggcgatcaggactctctggacgaggcgcaaagcgaaatcggcgagatccagaaggatctcgaccagatggagattcagaccctgcttgacggcgaatatgacgaacgttccgccgtggtgaccatccgctccggtgccggcggcgtcgacgcggccgacttcgcgcagatgctgctgcgcatgtacctgcgctactgcgagcgtaacggcttcaaggccaaggtcatggacacctcctacgccgaagaggcgggcatcaagtccgccaccttccaggtggacgccccctacgcttacggccgactgtccgtggaaggcggcacccaccgtctggtgcgcatctccccgttcgacaaccagggtcgccgccagaccagcttcgccgccgtggaagtggtgccgctggtcgaggccaccgatcacatcgacattccggatacggacatccgcgtggacacctactgctcctccggccccggcggccagggcgtgaacaccacgtactcggccgtgcgcatcactcaccttcccaccggcatcgtggtgaccatgcaggatgagcgttcgcagattcagaaccgcgcctccgccatggccgtgctccagtcccgactgctcgtgctgcgccacgaggaggaggccaagaagaagaaggagctcgccggcgatatcaaggccagctggggcgatcagatgcgctcctacgtgctgcacccctaccagatggtcaaggatttgcgcaccggctacgaaaccagccagacccaggccgtgttcgacggcgacatcaacgcgttcatcgaggccggcatccgctggcgccatgaacagcgccgcgccgccgaaaccgaggagtaaacagcattatggcactgatctcactggacaatgtgtccaagatctatcccaaaggcacccgaccggcgcttgacgacatcaacctcgatattgaacgcggtgatttcgtgttccttgtgggtgcgtccggctccggcaagaccacgctcttgagcctgctgttgcgcgaggaggaggccaccagcggcgagattcgcgtggccggcaacgatctgcggcgcatcaccaaccgtcaagtgccgcagtaccgccgttcgctgggcttcgtgttccaggattacaagctgctcaataacaaaaccgtatgggagaacgtggcgttcgcccttgaggtgatcggcacgcggcggtccaccatcaaatcgttggtgcccaaggtgctgaataccgtgggactcaccggcaaggaaaagaactacccgcatgagctctccggtggcgagcagcagcgtgtggccatcgcccgcgcctacgtgaatcacccgcagattctgctggccgacgagcccaccggcaacctcgacccgaccacttcgctgggcatcatggaagtgctggacgccatcaaccgcaccggcaccaccatcgtcatggccacgcataacgaagagatcgtcaactcgatgcgcaagcgcgtggtcgaactgcacaacggcaagatcgtgcgtgacgaggctcatggctcctacgattccgccctgttcttcccggatgccgaagtcgaagccaagtccgacaccgcccatcatgtgctggcggcggcgaccaaggccatcgagggcagtgacgagccgtctgaaggcatcgcccgtttggccaattccgtgcattccggccgcaccggccgctatggcgagacgtttgcgccgctggaagacacgctgacctggggcaagggcattccgttggatgagcaggccgccgccctggaaagcacccaggcgttcgacccgttcaaggacgagtccggcgagaccgccgcgggccgggttgccgatacgtccgtgtcatccgccgccgagccgccggccccgccggaactgccggccccgccggaactgccctccccgccggaactgcccgcaccgccggaaccgtcggaaccgcccgaaccgccggccaacgagcagtccgccggcgagcagtccgccgcagaccaaacatccgacgatcaacccgctgagggcgcgaaggagtaagggggatcatatgcgagcacgattcattctgtccgaaacgtgggccaacctcacccgtaacctgtcgatgctgctgtcgctgacgctggtcaccttcatctcattcctgttcatcggcgcttcggtgcttactcaggcgcagatcaccaaagccaagggcgactggtacgacaaggtcgaggtcgtggtgtggctatgccccgacggcaccagccaatccgcgaactgcgcttccggcaaatcgccctcagccaatgagatcacggcactgcagaaaaccattcgcgacgaactcaacgacgtggtctccaacattgactacgtcagcaagcaggacttctacgacagcacattcaccaagcagtacccgaatggcgaattccaaggccgtacgctgaccgcggacgatatgcaggactctctctggctcaagctgaaggatccgaccaaatatcaggtggtctccgaagtgctctccggcaaggagggcgtggaagacgtcaccgaccagcgccagatcttcgacccggtgttcgccgtgctcaaccgagccacggcggttacggctgtgctcgccggcgtgatggtggtggtcgccatcctgctgaccggaaccaccattcgtatgtccgccgcatccagacgaaccgaaaccgaaatcatgaggtacgtgggtgcctcgaactggacgattcgtctgccgttcattctggagggcaccatcgcctcgctgatcggctcggtgctctcgtgcctgatgctttcggctatcgtcaacgtgttcgtcaccggctggctggcgaaatccgttacatggattccttatgtgaatcagctcacggtactggtgatatcgccgttcctggttgtgggcgcgatactgctgtccatcatcgcttcaaccatctcgttgcggcgttatttgagggcgtaacgcgaccggcttacccgcgagaaatgtgatgacatcgtgtgcaagcctctcaggttcgcatgttatggtattggcttaagtgagcgaaaggactattcacatatgacgaacgtacgtgtgatcaagcccgcactggcggcactggtggccgccgcagcctgtgtgggaggtctggcgttcagctcggcacagcctgcccaggcagacacctattccgacctgatcaatgcgcagaaccagcacgccgcgtcggtacagcgcgaggccgaactcaagcagcagctggccggtgccagccaggacctggcgaataaggtacttgagctggacgatctgaccaacaacaagattgtcgccgcgcaggccaaggtcacacaggccaacgaggatgccgccaccgctcaggacgaggccgatgccgcatccggacgtctttccgccgcgcagaaagacaaggagacgctcgaggagcagatcaagcagaccggcaaggactacgatgacgcgcacgccgccgtggcccagctggcccgtgacgagatgcacggctcgaatgcttccgacgtgatgagcgtggtcacgggtgccaccagcacacaggacttcgtcaactccatgcagtcccgggacgcgttgtcccgcaacgaggcgaatgcggcttcctccgccgcgacctcactgagcacgtcgaagaaccgtggcgagcgcttggcggccatcgaaaagcagatcgctgtgctcaagacccaggccgatgagaaggccgcttccgcacagaccgccgccgaaaccgcgcaaagcgaacgtgacgctttggataagctgcgccaggaaggcgaagcaaggcgtgacgaactgtcttccatgatcgacagtctggattcccaatccgccaagcaggcggcccggaccgtactgatcgcttcccaggtcgattcctacaatcgtcagttccagaaggagcagcaggacgccgccaaccgggtggataccggtaaccagggcggcacgccgtccactccggtgacccccgctccggcgcccgctccggctccggctccggcgccggcgccggcccccgcccccgcccccagcgtcggcggccaaggcacgtcgaacggtgattacggcaacgcctatgccgccggccagtgcacgtactgggcgtatgaacgccgtaggcagatgggcattggcacgccgtcctatctcggcaatggcggcaactggtggcgcagcgccccctcgtacggcttgcgcgtggaccacaaccctcaggtcggtgcggcgctctccttcctgcctggtcaggatggtgccgacggtacctatggccatgttgccgtagtcgaagccgtgtatggcgacggcacattccagatctccgaaatgaactggggtggtccgtggaacatgcactaccgcaccttgaccaatttgggtcagtactggttcgtccactgaccggttggttcggccgatatatgcggttgaagggttcctcttgaaggggaaccctttttcgtattcgaggccggtccgtgatatcgtcggatgttgcgttgctacccacgaaaggaggagacatgcccaaggaaaccggtgagaaactcatcgtacagaacaagaaggcccggcatgactatgccatcgaagacaagtacgaggcagggctggccctgaccggcaccgaggtcaagtcgttgcgcgaaggccgcgcatcgctgtccgaggcgttcatctccatcgatcgccgcggcgagatgtggctggagggcgcgaacatccccgaatacctgaacggcacatggaacaaccatgcgcccaagcgcaagcgcaagctgctgttgcaccgactgcagatcaccaagctcgcccgcggcatcgaggccaagggatacacgattgtgccgctgagcctgtacttcaaggacggtcgcgtcaaggcggagatcgcactggcccgaggcaagaaggaattcgacaagcgccaggccctgcgcgaagagcaggacaagcgcgaagccctacgcgtcatgcgctacgccaacatgcgccactagtccctacccttggctcccctccggaggggagccaagggtaggatgtccgcgttgtgggtcatttcgcccacgattaacgcttccgtagcattgcactcctacgctctggaaccatctgggaaacatacccgcccagctgactatccggagagaggaaatccaatgtctctaagcaagggaatacaatccgctgcggccgccgccctgagcgcggccatgctgatcgctgtggcggcctgtggcacgactgacggcaccgacaccgcatccaagagcggcgattcatccaaggactcgtccagcacttcgattcaaggcttcgacaccagcagcatccagaaggacgacgagattgccgcactgctgcccgattccgtggccggcgacggcacgctgaccgtcggcaccgatacttcctatgccccggccgagttcctggccgaggacggcaagaccccggtcggctttgatgtcgacctgtccaaggcgctggccgcagtgttcggactgaaggaaaacaccgtctcctccacgttcgattcgattatcccgtccgtcggctccaagtacgacatcggcatctcctccttcaccgtgaccaaggaacgcatggaggctgtggacttcgtgacctacttcaaggccggttccacgttcgtggtgcagaagggcaacccgaacaaggtcgactcctcgaacctgtgcggcgtgaaggtggctgtgcagaccggtaccacccaggaagaggaagtcaacaaggataacgagcagtgcaaggcggacggtaaggatgccatcgacatccagtcctccaagctgcagaccgatgtgactaccgccgtggcttccggtaaggctgatatcttctacgccgatacgccggttgccggctacgccatcaagcagaccggtgatacgctcgaggccctcggcgaggacgttggtgtgacccctgaggccgtggccgtcaagaagggcgattccaagaccgccgaggccgtacagaaggccatccagaagctgatggatgatggcacgtacaagaagatcctcgacacgtggggcgtctcttccggcgccgtcgacaaggccgagatcaacccgtccgtcgagtagtttcggttactatgaagactcccgttgccctgcggcgggagtctttttgtatatgtatgcactgtagtgtataaatatgcttaaccgttgatcgttgccgttgaagcggcgtaagagagaagaagaaacgattatgcagtccaccaaactgaagtccattatggccattgcactgagctcggccatgctgttcgccaccgccgcttgcggcacctccgacaaggccgatgccggtacggattccgccaagggctccgatgccgccaccatcaccagctacgatgtcagctccgtggagaaggatgacaccatcgccgcactgctgcctgaatccgtgaccaaggacggcaagctcaccatcggcaccaacccctcctacgccccggccgaattcctcgacgccgacggcaagacccagatcggctacgacatggatctcgcccgcgccatgggcaacatcttcggtctcgagaccgaaatcgtctcctccaacttcgatacgatcattccggccatcggctccaagtacgatctgggcatcgccgccttcactatcaccaaggagcgcatggaatccgtcgacttcgtctcctacttcaccgcaggcatgggctatgcagtggccacaggcaaccccaagaacgtcgatgagaacgacctgtgcggtctgaacgttgccgtcgagaccggcaccgtcgaggaagaggccatcaacaagaccgccaagcagtgcaaggcggacggcaagaaagacatcaccatccagtcctccaagcagcagaccgacgccaccaccgctgtggtgaccggtaaggccgacgtcttcttcgccgattccccggttgtcggctacgccatcgcccagaccgatggtcagctggaacagctcggcaaggacttcgatgaagtgccgaacgccatcgccatcaagaagggcgattcccagaccaccgaagccgtgcagaaggccatgcaaaagctcatggacgacggcacatacaccaagatcctccagcactggggcgtcgaatccggcgcactggacaaggccgaaatcaacccggccgtcgaatagtcgacaagctgtcgcgaaaattcgaatggggcgcactgtttgtaacacagtcgccccattcgtgcactaaggttcaatgctagttgcaacttgcagttcaggctgcctaacacatccaaggaaccagattatggcgaagaaagaagtcgacggtgaggggctgaacatccccaaccgcatcaaggcgttgccggtcaagcgccccggcccgattgtggccgcagtgatcgtggtactgctcgccgcgatgctcattcaaggcttgattaccaatccgcgactggattggcccaccgtctggaagtacctgttcaacgagaacgtgcttgaaggcattcgctataccttggagctcaccgtgatctccatggtcgtggcgatcatcctgtcggtgattctcgccatcatgcgcaaatccatcaatccggtgctgcgcggcgtcagctggttcttcatctggttcttccgcggcacgcctgtgtacacgcagctcattttctggggtctgttcgccgtgctgattcccaagattagcctcggcattccgttcacctcggtggagttctggagcatcgactccaacgtggtggtcaccgcattcaacgccgcatggattggtttggctctgaacgaggccgcctacctgtccgaaatcgtgcgtgccggccttgaagccgtggaccccggccagaccgaggcggccaaggcattgggcatgaaccgcacgctcatcatgcgccgcatcgtgctgccgcaggctatgcgcatcatcatcccgcccaccggcaacgagaccatcggcatgctgaagaccacctcgctggtcaccgccgtgccgtttaccctcgaactgcagttcgccaccaacgccatcgccaaccgtatctacaagccgattccgctgcttctcgtggcctgcttctggtacctgctgatcacctccattctgatggttgtgcagtcccgccttgaggcgcacttcggcaagggcttcaacgcccgcccggtgggcaccaagggcaagcagccgccatacgatccgccgtatcccggcaagtctgacggcgagccgaaggacgatgtgaacaaaatcaatcagaccaccttcgctgggctgaatgcgtaaggcgggagcgagaattatgactacgaacgacatcaccaactccgctccggtcgtgcgcaaggcggctgacggttccgtgattcctgctgtcaaggccgtgcaggtgcacaaggcgtttgggccgctgcatgtgctcaagggcatcgatctaaccgttatgcccggcactgtgaccgtgattctggggccctccggttccggcaagtccacgttcctgcgtctgatcaaccagctggaaaccctgaccggcggttccattgaggtggacggcgaactcatcggctacaagcacgtgaccaaaaacggccaggacatgctgcagaccctggacgataaggagatcgccgcacagcgctctcgcctcggcatggtgttccagcgcttcaacctgttcccgcacatgaccgcgctggaaaacgtgatggaagccccgattcacgtgcagcaccagtccaagaaagccgcccgtgacctggccgtggccgagcttcagcgcgtcggtctgggcgatcgcatggactattacccctcccagctgtcaggtggtcagcagcagcgtgtggccattgcccgtgctctggccatgaagccggagatcatgcttttcgatgagccgacctccgcccttgaccccgaactggtgggtgaagtgctcaacgtcatgcgttccttggccagggaaggcatgaccatggtgtgcgtgacccacgaaatcggcttcgcccgcgaagtcgccgaccagatcgtgttcatggacggcggcgtagtcgtagaaaagggcggccccgacatcatcgaccaccccaccgagcctaggtttaaggacttcctacagcacgtgctgtaggaaggctgttatattgcctcagcactgtcgtgcttcggcgtcgcctacggggagcccactgggctccctgctttacggctccgtctacagcacgtgctgtaggaaggctcgttgttgcagctccaaaaacgtacgctgatgaactcagcgtacgtttttttgcgacgcctaatcgcacccccatctcgtgaagaacgtacgctgagtggtagtcagtgtacggttttcacgaaggggcatgttccaatcctgcaaaggcggcgggttggattcgctttgcgcaataatcgtccgctaggctggtgaaccatgtgtggaatcgttggatacgcgggaaatattgaaacggcatgcggcaagcctttggaggtctgcctgcaaggcctggaacgtctggaataccgaggctatgactcggccggtgtggcgctgaccgcgcccggcatggataaggtggtcgtgcgcaagaaggccggccgtttgaagaacctgatcgaagacatcgagcgtaagccgatgccgcttgccacggtgggcatcggccacacgcgctgggccaccaatggcgagccgagcgacgtgaacgcccacccgcacaccagcatggacggcaaggtggccatcatccataacggcatcatcgaaaacgcctctcagctgcgtctcgacctgcaagccgaaggctaccgattcgcctctgccaccgacactgaggtggccgctaagctgctcggcaagatcgtggacaagattatcgcggacgaaggcaagccagacttgttcaaggctgtgcgccgtatggcccgcatgcttgaaggcgcgttcaccattctggccaccgactgccgccagccggacatcgtggtcggagcccgccatgattcgccactggtcgtgggccttggcgagggggagaacttcctcggttccgacgtcgccgcattcgtggcctacaccaagcgcgccatggaagtcgaccaggatcaggccgtatgcgtgtccgccgacaaggtcatcgtcgccgatttcaacggcaacgtggtcgaaaacccgaagacctacaccgtggattgggatgcttcggccgccgaaaagggcggctgggattcctttatggacaaggagatccacgaagaccctgccgcagtgcagcgcaccctgcttggccgcttcgatacgaatggcggcatcacccttgatgaagtgcgtatcgacgaacacgacttcaaggccatcgacaaaatcatcgtcgtggcctgcggcaccgccagctacgccggccaggtagccaagtacgccatcgaacactgggtgcgtatccccgtggaaatcgaactcgcgcacgaattccgttaccgtgacccgattctgaccccgcgtacgctcgtggtggccatttctcagtccggcgaaaccatggatacgctgatggccctgcgccacgcgcgcgaacaggggtccaaggtgctggccatctgcaacacgcagggtgcctccattccgcgcgaatccgacgccgtgctctacacacacgccggcccggaagttgccgtggcatccaccaaggcgtttgtggcgcagatcaccgccgcctacctgctgggcctgtatctggcgcaggtcaagggcgcgatgttccgcgatgagattcatcaggtgctcgactccctgaaagacatgccgcgcaagattcagtgggtgctcgacacccagcccaagaccatccaggcggccgccgagcgcatggtgaacgccaactccttcttgttcctcggccgtcacgtgggctacccggtggcgcttgagggtgcactgaagctcaaggagatcgcctacacgttcaccgagggcttcgcggccggcgagctcaagcatggaccgatcgcgctggtggacgagggtgagcccgtggtgttcatcgtgccgccgcagcgcggccgcaatgtgttgcacgccaaggtgatctccggtatcgaggaggtcaaggctcgtggcgcgtacatcatcgccgtggccgagcagggcgacccggatgtggaacggtacgctgacgtggtgttctggcgccccgcctgcccaacgctgatgagcccgctggttgacgtggtgccgctgcagctgttcgccatggacatggcaaagctcaagggctacgacgtggacaagccccgcaacctcgccaagtccgtgaccgttgagtaagccacatcggtatgtgattgacgagcctcatattccgtttgagatggacgtgctgtatgaggacgagcggatcatcgtggtggacaagccgcattttctggccaccatgccgcgcggcatgtggtatcggcagaccgcgctgatccgattgcgtgagcggctgggggagccggacatcacgccagcgcatcgattggaccgcatgaccgccggcgtattggtgttcgtgcgggatccggcctgccgcggcgcgtatcagatgctgttccagaaccggcaggccgtcaaggtctatgaatgcctggcgccctgccggccgatcagccgcccgcgattcggcacgatcatgcaggtcgaaccgccacgcccgttcccattgctgcgccgatcgcacatcaccaaggaacacggcacgatggccgcattcgaggaaccgggtttggccaacgccgaaaccctcatcgagcgcggcgacctctgtttccctcccgctggcgggaggtggcgcgaagcgccggagggtggtccccatccgggaaatcaccccatctgccgctacacactccacccgcgcaccggcaaaacccaccaattgcgcgtccacatgaattcgctcggcctgcccatcgtgggtgacgacttctacccgcgcatccagacacgcccctacgacgatttcagccagccgctgcaattagtggcgcgtgtgctacgattcaccgatccaataacaggcgagaagcgcgaattcgtttcccgtgtgccgcttaagatctgatttcttaggggggatggcgagaccaatccccgcccgtccgaatcactgtccctttcgactggccatccagctcattgcatcgtcgtacaccatcatgatgcgcttgcgatagctatcgatgaattcctgcgcaccaatgctcgcgataacgtcgtgagcgggttgcacggtgctgtcgaatgcctccggcagcctatccaccaaggtgtggaatcgtaaaatcacggattcctcatctaatcccatccgctgtgcgaatcgttccagatgtttgcggcgtaattgaagaagatctcggcgtccgccgatgttcatcgccaaagtggcatttatgatctgcttgccatgccccaaataagggaacaccgaagcaaggtcatagagcggggcaagccgcacggacgcgccatcgagcaatagcgagtagttcttggcgtggctgtctgttgccccgacgagataactggcgaggatgccgtcggtgaaggctcggatattgctttcggcctgaccgggcagaccgtgcttgcgcaacatttccgcatatgcattggacgttgggccgttgtgttcctcgtatttcagcgatgagggaatgcccagcgcttgggtaaagtcttcttggtgcagggccgtcaccgtaccattggcggacactatacggtcataccgctcgctgatgatggctgggaccccatcaaagatgtgaaaagaggtgtgggccacgggtattcccatcgcctccacaatgcgcatgggtgatgtgttcgttgaatgcttggtgtggaagggtcggtatgccgggcttgatgatatgagtcgtccgcgcgattccagtggtggagaaccatgatccatcgcggttcctcagtgcgatcttgccctgctgtcccgcgaccgaccaatgctcgtctacgcttgcggactggatgcctgtgggggcggctgcgcgtagtcgattcgcgatctgcgaatcgctgattggaataagcgaatcgtcatctatgggcaagtgcgggtcggcggacagtcgtaatgcgccggtggcatcgaatccgatggcttgcaacagatcaaatgcgcttgtcgatcgggcatgatgcaatcgcatggcttcatctcgggcctgaggggattccgggaccagggcctcaaggaaattacgcgggatgtcgcctgaatattcggctgcggtaatgggcatggaaagcgatattggtgtgggtgattgcgaccaacgataggaatcgtgatattggaaaataatgctgccatcgtttgttcttcgaaactggccgatgggtgtttcgccgagaaatgcattgagagtgttttcgctcatggtgtcaccattcatagagttcggcgggctgcggggttttgcggacatccagcgacaagccaagctcagtcagagcgctgagaatggtggagaatccgggattggggactcgggcgtgttcaaattcgatcagccagcgacgtgacacgcccagccgttgggccatgtcggtctgactgatgccctggcgttgcctttcatccttgataagccgcgcgtattcggcgatatccatgacaatcatgtgcaaaatatatcacagtatagtaaagtgtgcaatattctgcacatagttggaaatgtgcagaatattgcacaaccgagtcgattggtcggtgcggaattgcctatggatcactggcaggtgaatcactgacaggtaccagtggatgccagcacatgccgctcgtcagctgatgtcgcgcacggaaccgcgttcaatcagttccggcgggattacggttttgacgccgaccggtatcttctcgccttcgcattgacggcggaccatggagaaggcggtggcgccaatgtcgtcaaagcgcagcttcatggtcgtcaggttcaagcgcgggaccatatcgaccagcgaatcatcgacgcccacgatgctgacatcctcgggcacgcgcttgcccgctgactgcaacccgagcattgcgccgtatgccatttggtcgttggcggcgtagatggccgtgcagtcggggtcgtgggccaacgccacgccggcctggtagcctgaatccgcgcaccaatcgccgatgtacatgctcggtatgcgtgctcccatttgttccaacgcttctcgccaaccgcgggcgcggctttcggcggcgcgcgaggtggacggtccggcaatgtggtagacggtcttgtgccccttgctcatcaggtaatcgacgatagcggtcgagcagccatactggtcggcgtcaacggtggggcagtggtcggcggcggattcgcagatgagcacgactggaaattctcgcggaggcttgtatccgacgaaatcggagatgcgttcctccagcactacgatgacaccatccaccggctgacgctgcatgcgatcgatggcggcggaaagcgtgcgttccgcaccgtggcgcatggtctggatggtgactgaataatcgtcatcggccgcgttggccacaatagaatcaaggatgcgggcgttgccgaacgtggcggtgttgaacatcaccacgccgatatcctggaagcggccgtgctttagggctcgggccgcataattcggacgatacccaaggcgttccattgcggcttcgacacgctggcgtgtttcgggtttcaccgcatcgctgccattcgccacgcgggacactgtctgtggcgaaacgccggcggctttcgctatgtcttgcatggacacctgtgttggcctcgacatttcaccctcgcttgactcattaatgtcggtgtttcgtttgcaacgcttatcttagggtcgcttacggtaacgataacatcgttgtcttcgtgaccattgtagcagagtgactgagaaacccttaattcaacacggtactcaacacgattggacaatgttacaaatggtgttatgatgataacgcaaacattttggtcaaccttcgaaggagaggggttgggaatggcttcagccgatatcgcagctgcgcccgtgcattcgggcaaggctcgtgtgaataagcacaaggccgattggcgtggatggaaattcatgtggccttttgcggtggtgttcgtgttcgtgttcatcgtgccgatcgtgtacgccgtttatatttcgttcttcaagaagcagatgatcggcggcaccaagttcgtcggcttcgagaactacgcgcgcctgttgggtgatggccagttctggagcagtgttggtcgtgtggccctgttcacgtgcgtgcaggtgccgatcatgctgtgcctgtcggctttgatggccctggcgttggattcgatgaagctgcatggcacgaggttcttccgtatctcgacgttcctgccctacgcggtgccggcggtggtgtcgacgttgatctggggtttcgtgtatggcgcgaagtacggcctggtgggttcgttgaacgatttcctgggcacggacatcgacgtgctcgccccttccgtgttgttggccagcatcgggaacatcgtgacgtgggagttcacgggctacaacatgctcatcttctacagctcgctgtcgaccatcccgcattccctgtatgaggcggcgagcatcgacggcgcgtcggagtggcagatcgtgaagagcatcaagcttcccgaattgcgcggcagcctggctatcacggtgatcttcagcatcatcggctcgttccagttgttcaacgagccgagcattttgcagaacatggttcctggtaatgcgatcacgacgtattacacgccgaacatgtacgcgtacaacctgagcttcagcggcaaccagtcgaattatgcggccgcgttggcgatcgtgatggccgtgatcaccatggccatcgcctacatcgtccagttgaacagcctgaaggagcagatgaagtgacgatgaccgctgttcgtgttgaggaatcgatgatgatcgtgaaggagcgtatgtgatgagtgcagcaacgacttcggccgccggtcgcctgaccgacgccgagctcaaggcccaggagaaggccgccaggaaggcggagaaggcccgccagaagaggatcgccgccgacgaggccgccgaacgcaagcgcagcgcgaaggccgggttcgcgaacgtgaacaacccgaggcgttccacgttgttgaccgtcctgtgcgcggtcttcgccgtgtactgcctgttcccgttcgtgtacctgctgatcaacgcgacgaagacacaggccgacttcacgagcacgttcggcctggggttcggcaagacgttcgctttgttcgacaacatcgcgaccgtgttctcctatcaggacgggatcttcgcgcgctggctgttcaacacgatcctgtacgtggtggtcggcgccggcggcgcgaccctgctggcgatcatgggcggctacgctctggccaagttccgcttcccggggcgcaaagcggtgttcgtggtcatcatcggcgcgatcagcgtgccgggcatcgctttggcggttccccagttcctcctgttcgccaaattgggcctgacgaacaccccgtgggccatgatcatcccgtcgctgatcagcccgttcggtttgtacctgatgtggatcttcagcgagcaggccgtgccccaggagctgctggaggcggcgcgcgtggacggcgcgtccgagttccgcacgttctggcagatcagcctcccgttgttggctccgggcatcgtgacgacggccctgttcacgatcgtggcgacgtggaacaactacttcctgccgttgatcatgctcaaggacgcggactggtacccgctgaccatcggcctgaaccagtggaaggaccaggcgagcacggccggcggccaggcgatccagaacctggtgatcacgggctccctgatcacgatcatccccttggtcatcgcgttcttgtgcctgcagaagtactggcagtccggcctggccgcaggcgccgtcaaggagtgagcgtactttggctcccttctggtggagggagccgagataaaggcataaccactaacagaaggaggcacctatgcagatattcgcattgttgagaattgtgcaggtgcctccttgtgtgtctgtgcaacgtgaggaatttattcccgtagacgcagattatcgataaaattcaataaaggaactgaatcatcatggaacgtaaagagttcaagtggccgcagcctcttgcgggcaacgagccccgcatctggtacggcggcgactacaaccccgaccagtggccggaggaagtctgggacgaagacatcgagcttatgcagcaggccggcgtcaacctcgtctccgtagccatcttctcctgggccaagcttgagcccgaagaaggcgtgtacgacttcgattggctcgatcgcgtcatcgacaagctcggcaaggccggcatcgccgtcgatctcgcctccggcaccgcatccccgccgatgtggatgacccaggcccacccggagatcctctgggtcgactaccgcggcgacgtctgccagcccggtgcccgccagcactggcgcgccaccagcccggtcttccttgactacgcgctcaacctgtgccgcaagatggccgagcactacaaggacaacccctatgtggtctcttggcatgtgagcaacgagtacggctgccacaaccgcttcgactattccgaagacgccgagcgcgccttccagaagtggtgcgagaagaagtacggcaccatcgacgccgtcaacgacgcctggggcaccgccttctgggcgcagcgcatgaacaatttctccgagatcatcccgccgcgcttcatcggcgatggcaacttcatgaatccgggcaaactgcttgactggaagcgcttcagctccgacgccctgctcgacttttacaaggccgagcgcgatgccctgctcaagatcgcccccaagccgcagaccaccaacttcatggtctccgccggcggtaccggcatcgattacgacaagtggggttacgacgtggacttcgtgtccaacgatcactacttcacgcctggcgaagcccacttcgacgagctggcttactcggcctccctgtgcgacggcatcgcccgcaagaatccgtggttcctcatggagcactccagctccgccgtcaattggcgcccgatcaactatcgcgtcgaacccggcgaattggtgcgcgactccctggcccacttggccatgggctccgacgccatctgctacttccagtggcgccagtccaaggccggtgccgagaagtggcactcttcgatggttcctcacgcgggccccgactcccagatcttccgcgatgtgtgcgagctgggtgccgacctcaacaagcttgctgacgagggcctgctgagcaccaagctggtcaagtccaaggtcgccgtcgtcttcgattacgagtcccagtgggctacggaacacaccgccacgcctactcaggaggtgcgccattggaccgagccgctcgcgtggttccgcgcgctggcggacaacggtctgaccgcagacgtggtgccggttcgcggcccttgggacgagtacgaagccgtcgtgctgccgagcctgaccatcctgtctgaagagaccacgcgccgcgtgcgcgagtatgtggcgaacggcggcaagctgttcgtgacctactacaccggtctggtggacgacaaggatcacgtctggctgggtggctaccccggttccatccgtgacgtggtgggcgtgcgcgttgaggaattcgccccgatgggaaacgacttccccggtgccatggaccaccttgacttggacaacggaaccgtggcgcacgatttcgccgacgtgatcacctccgtggccgataccgctcacgtggtcgcctccttcaaggcagataagtggaccggtttcgacggcgctcccgccatcaccgtcaacgacttcggcgacggcaaggccgcatacgtcggtgcccgtctcggccgtgagggtttggccaagagcctgcccgtgctgctggaggaactcggcatcgagacttcggctgaggacgatcgcggtgaagtgctgcgcgtcgagcgtgcggacgaaactggcgagaaccacttcgtgttcctgttcaaccgcacccacgatgttgcggtcgtggacgtggaaggcgaaccgctggtcgcctcgctggcccaggtcaacgagtccgagcacacggccgccatccagcccaacggcgtacttgtcgtcaagctgtaaaaccgcgcatagcgcctaattacccaacggctcccttgctgctcatcgtagcaggggagtcgttttcgtatctccagcaaagtcgggtagggtggtcaccgtgcgaggcaaaaacagagtgacgatggcggacgtggcccatgaggccggtgtttcggtagcctcggtgtctaattttctgaacaaacagccatatatgagcgaggcgatggccgcgcgtattgcggaagccatcgacaggctcggatacaaagtcaactcgtcggccagaaacctgcgttccgggcgtacccggttgctcaagctggtcattcccgatctgcggcaggtgtacttctccgaactcgccgaggatattctggccgaggcccggcaacatggctacggcgtcatcgtggaatccaccaccaacaatcgtgcccgcgagctggaaagcatcgcatcgatgggcacgcacagcgcggacgggctcatcttaagccctctgatgatgacggttgacgatatcgcggctttggatggcgattacccgctcgtgctgttgggtgaacgtttgttcggcgtcaacgcgccgcacgtagtgattcgcaatcgcgaaggggccgccgccgcgacttatcacctgcttgatgccggttgccgccgcatcgccgtagtcggtgccgtgccccaccccgagcacgatttctcgtcgggctccatccgcacccacggatatcgtgaggcgctggccgcgcgcggcatcccctgtgatgacagtctgcttatcgaaacccaaggctgggggagcgccgacggtttggtcgcggtggacaccatgctggagagtggcctgcaattcgatgccgtgttcgctttgaatgacttgctggcgtggggcgtgctgcgtgaactgcgcgaacgcggcgttgccgtgccggatgatgttcgcgttatcggcttcgatgacgtggaggaatcggcctacatggtgccgtctctttccaccgttaaccccggcagggaagccatcgcccgactggccgtcgaatccatcatccaacaggtcgaatccggcagtcgcgctcctgcccaaaccatcgaggccccctatagcctctccctgcgcgagtcctcaccggcgttggcctgcgcctgatgaatccatggttcgaaatatccgaagtgaatgacaaggcccgtcaatcgtatggtgattgacgggccctggtcgtattggacttgactgtacttggtacgggcgtgactctccgtcttttagccgtggaattccacgctgatccaggagatggcgggaagcgttgccgtgcaggtgccggtggcgttcatcgcaatgccgagcggttgcggcgtgacggcttcgggcgcttcggcggtgttggtgcggtacggatcgtcctcatgcaacagttgcgccttgccgagcgcgagcgtgccgagaccgggcaggccgggcagcccggaaaggtcgatggtgagcgtgtgtggggtgttggcgtcgcggttgacggcaagcagcagaccggtgcgggcctgttcatcccacgtgactaccgcgtcgatggccggcacgtcgccgtatgcctcggtatggatggtgggggagctgatggccggagcgtaggcctggccgcgcgcgtgaagggcggcttcggcgaacgggtagaacgtggtctgccgccatgccgggccgtgttcctcggccatgatgggggcgatgacgttgaccagctgggcgcgcgaggcggaacgcacgcgatcgcagtgcttgagcagggtgatcatcagggaaccttcgaccaccgcgtcggccgcggtgtagatgtcttccagcaaatgtggagacttgggccatggctcgtggtgcaaaccctgcgcggcctccgccttccactggtcttcctgctcgttccacttgtccgaataccatacgccccattcgtcgaaggacagggcgatgtctttggtgccgttgttggcttcgcgcgcctgatcggccgcgtccgagacggtggcgatgaacttggtcatgtcttcggaagaggccaggaagtcctgcatggaggcggcggcccgggttttatggccgcggtcgaagtagtaggcatggcaggagacgaagtcgagattctcgtaagccttggtgagcacggtcttctcccacgtgccgaaggtcggcatataggcacccgaggaaccgcaggccacgagttcgagaccggactcggcgagcttcatggcgtgggccaccttatccaccgcgccggcatattcttccgggctcatgtggcccacctgccacgggccgtccatttcgttgccgatgcaccacatcttgatatccatcggctcctcgatgccgttggccacgcgctgatccgcccaagcggtgccgggcgcgccgttgacatactcgagctcgtcgagcgcggctttcagcccccgggtgcccatgttgacggcaagcatgatttcggtgccggctttctggctccagcggtagaagtcgtcgatgcccatctcgttggtttcggtgcaatgccaggccaggtcgcggcgcatggggcgattctcgcgtggaccgatgccgtcttcccagttgtagttggatacgaaattgccgccggggtagcgcacgcaggtgacgcccagctccttgaccaggtcaagcacgtcttggcggaagccgttttcgtcggcggtgggatggctgggctcgtagatgccgccgtagacgcagcggcccagatgttctacgaatgagccgaacagacgcgggggaacgtcggctaccggagtggcgtcggcgttgagggcgatgctggcgtccggcgtggttgcgttgccagttgtggagacgttactggccgtggtgccggcggcggtcggcaccgggctgctttcctgcttgtcgggatgggtggtttcggcggaatactggctgttgtgagtggtcatgagcgggatgcatctccttcggtttgcggttagtcaccatggtgcgacgtgtcgtgtttgcgtaaacataaaacatgtggtaccgtttcttaaaacgatacaaggcttggaacaaaacgccaagtcccgtcgtttcccataacaaggaaggaaagaacgatgaagttcggcaagaagacgattgccctgattggtgctgtggccatgctctcctctgtagctgcctgcggttccacttctgccggggatggcggaagcaccggctcctctgataagaaggtcgagctgaccgtgtggtcctgggattccacactgcctcgtacggtcaagggattcgaggccaagaacccgaacattaaggtgaaggtgaccaacgccggcaccaacaaggacgagtacaacgcactgtccaacgccatcgaggcaggctccggtgctccggacatcgcccagatcgaatactacgcactgcccgaatacgtgattcgcggccacctcgagaacctttccgatctcggtgcctccgatttcaaggacttctacaccccgggcacgtggtcctcggtgaacatcaatgacggcgtctacgccctgccgatggattccggcccgatggcctggttctacaacaagggcgtcttcgacaaggccggcgtcgatccgacccaggtgcgcacgtgggacgacttctacgaggctgccaagaagattcgcgccgtggactcctacatcacctccgattccggtgacgccggcttcttcgactccatgacctggctggccggcgcgaccccgttcgagacctccaaggacggcgagaccgtgaccatcaacctgaccggtgacaagaacgtcaagaccttcaccgacttctggcagaagatgatcgacgaagacctcatcgacaccaagaccgtcggctggaccgacgattggaacaagggtctggatgacggctccatcgcatccctgctgaccggcgcttggatgccgtacaacctgctttccggcgctccgaacggtgacggcaagtggcgcatcgcccagatgccgaccgcagatggctccgagaccaactccgagaacggtggttcctcgctggccatcgtgaagtccgacgacaaggccaaggtcgccgccgcctacaagttcatggaatacgcctgccacgacgccgagggcattaagacccgtgttgacggcggtgccttcccggccgacaacgacaccctcaagtccaacgacttcctcaatatgacctccctgaccgactccgacggcaaggcccacgagtacttcggcggtcagaagttcaacgaggagctggccaaggccgcagccaatgtgtccaccggctacaagttcctgcccttcgaggtctacgctcgcggcaagttcggcgactacgccggcgatgcctacaccggcaagaccacgctctccgatgccgtggcttcctggcagaaggacctgcaggattacgccaagcagcagggctaccaggtgaagtaacggcaatcacagcagacttcctcctgtggtttctgtagcgggaggttgcgataacaggatcgggcactcttcggagcgcccgattttcttatgccatgggagcagtggcgcgcggattgcgataccaagatggcgtgttgccgaagaatgtgtataataaaagatgttatcgcaaccatagctacaaagtggcgaaacaaagccgttttgtgactactgaaccatagagtgatggttcacgatagcatgacgacgaggagagttgccatgctgttgtggtgacaatcactgcagaccgccgaaaggcgatccaaggaaggagaacagaacgatgaagttcaccgttgctaagaaggccattgcacttaccggtgcggttgccatgctgggttccgttgccgcctgcggttccgacaccgccagtggcaagccggctcaagataaggacgttaccgaaatcaccgtgtgggcttgggagcccacgctgacccaggttgccaaggacttcaccaagaagaccggcatcaaggtcgatctcaagaacgtcggcaccaacaccaaggaatacacccagcttgataacgccatcgaggctggctccggtgctccggacgtcgctcaggttgagtactacgccatcccgcagtacgccatcaagggcaacctgctggacatcaccgacaagacctccggctactccgacttctacacccctggcccgtgggcttccgtgcagttcgccggcaaggtctacggcctgccgatggattccggcccaatggccttcttctacaacaaggaggtcttcgacaaggccggtgttgacgccgagcagatcaagacctgggatcagtactacgacgccgccaagaagattcacgctctgggcgacaactactacatcacctccgacaccggtgacgccggcttcttcgactccatgacctggctggccggtgcaaagccgttccagacctcttccgatggttccgaagtcaccgtcaacctgaccgaggacaagggcgtcaagaccttcaccgacttctggcagaagctgctggacgagggcctgctcgacaccaagaccgctggctggtctgaggactggttcaagggcatggtcgacggcaccatcgcctccctgttcactggcgcttggatgcctgccaacctggccaactccgctgctgacggcgctggcaagtggcgtgtgacccagatgccgaccgctgacggctccaccaccaactccgagaacggtggttcttcgctggctgtgctcgcctccaccaagaaggctgacgctgcttaccagttcatcgagtacgccaaccacggcgacggcgtggccacccgtgtggccggcggtgcattcccggctgacaaggcctccatggagtccgactccttcaagaacaccaccactgtgaagaacgccgatggcgaggacgttgactacttcggtggtcagaagtacaacgaggttctggctcaggctgctgagaacgtgtcctccgactaccagttcctgccctacgaggtcaaggcccgcaccatcttcggcgactaccttggcaagtcctacaccggcgaccagaagctgactgacggtatcgccgcttggcagaaggcactgcaggattacggcaaggatcagggcttcaccgtgaagtaagccttgaaccctcgctgagactgcctagctaatctcacctgatacacaaagccccgtgacgaatcccgtcacggggcttttaccgttttaagccccgcctagtacactcgtcaccatgcgagtgatcggacagcgaatcaaaagaatggcaaccatagcagtgactgccatcctttccgtatccctggcctcgtgcgggcaggccacggacgacaaccgtacggagatcagcgtatggagctgggaaccgagcatgggggaggtcatccgccgtttcgaaaaagccaatccggacatccgcgtgaaatggaccaatatctccggctacggcaatcttaataccgccattcaagacggttacggcacgccggacgtggctcaaatcgaatactatgcactgttgcagtacgcggtctccggccaattgcttgatctgaccgacaaaatcggctcggattattccaacttctttaccctcggcacatggtcgtccgtgcagctcgccggccgtacctatggactgcccatggattcgggcccgatgggcttcttctacaacgaagacgtgttccgccaagccggcgtggacgccaccaagatcaagacttgggatgactattacgaggccgccgaaaagctcaaggagatcggcgcgtatatcgtcgccgactcgggcgacggcagtttctatgacgcgatggtctggctcgccggtggtcagccgttccacacgtcggccgacggcaaaaccgtgaccatcgatttggatgaggatgccggcacccaacggttcaccgaattctggcagaaaatgatcgatgaggggcttgttgacaccacctccgccacatggtcggatcggtggaaaagcagagtgggcaccggcaccatcgcctccgtgttctctggggcttggatgccgtcgctgctgctgtccaatgtgccgggcgcggccggtctgtggcgcgtggctcccatgcccacctatgatggccagcccaccaacgccgaaagcggcgggtcggcactgaccgtactgcaattgacccgtaagccggatgcggcttatcgtttcgtggactttgtggcgcatgacgcccaaggcattagcgcgcgtgtggatggcggtgccttcccggccgattatgccaccctgaattccgctgattttttggataaaaccacgattaccaatgaccggggcattgaaatcccgtatttcggcgggcagaagttcaaccgtgtactgtcggaggccgccgaggatgtgtcggtcggataccagtatctgccattcgaagtgtatgcgcgcagtgacttcaaatcgacggtgggccaggcatacgagtggtccggcagtttccacgcctatcagcagcgacaggaagccattgagatgggcatgaaggacgaggaaggcaacccgctcgaaccgttggagaagcccggcaagaaagtcagcctctccgacggcctggcccaatggcagaaagacctccgagaatacggcttcaatcagggctttacgattaagtagggattcggggttgggtcggaatcgaccgcgctatacgcggccgattcctgcatactacgtcacttcacattgcgcgagtagatgtgcgccatgcccttgaaaatcaaatccgggtcatacacgtcaatcagctcggtgtcattctcaaacactcgaccgaggccaccggtggtgatcaccttgaaatcctcgcctccgagctctttgcggaactgacgaatcgtgcgctccacaccgcccaagaacgtgtaatacaaaccggcctgcatgcaggtcttggtgttggtgcccagaatcgtatctggtcgcgtaatttccacttccggcagctgggccgtatctccccacagagcggccgcaccggcacggatgccggtggtgatgacgccggaatcgaccacgcccttgtcgctcacgtgtgtgaacgtggtggcggtgccgaaatcagccaccagcactgggccgccatactcgtaataggcaccggcgcagtcggccagaatatccgcacccagcgatttcggatcgtcaacgcgcacgttcataccggtcttgatgcccggtcccaccaccatcggatcaatgtcgaggaatttgacgatggacgaacggaaggagtgcatcactttcggcaccaccgaacagatgatcacatcgtccacatcggatggctgaaaaccgctcattctcaggaattcagtcagaaacagcccatactcatcagacgtatggttggctttggtggtgatgcggtaggtgccggcgatggtatcgccatccaaaaagcccagcacgatgttcgtattgccgatatcaacggcgaccagcatgataaccctccagattcaagatggatttcatgcgcaattctacagtcccatggctatgatggcctgcggtggtcgacccagcgtggcggccaaccgtagaacacaacatatacagaggaagaaccatgtctcaagacaatggtgcgcacgtcgaagacggcgcaaccacagatgcgagccttgcctcgcgcgcaaagaatccgaaaaaaagcggcccgaagtggtggctgatctcactgattgccgtcatcgtggcagtggcggtcgtcatcggcgtcacgctcgctttcggcggtaagaaagatgacaagtcggcttcgtccagcaaccaatatgccgacaccgtgaccatcggcctcaaactggcccccaccaatctggacatccgcaacaccgccggctccgcgcttgaccagatcctgatcggcaacgtatacgaaggcatcgtggcacgtgactccaagaaccaggtcgctcccgccatcgcctccagctgggagacgtccaaggacggcctgacctacaccttccacctcaataagaacatgaccttcttcaatggcgacaaacttgacgccgaggacgtggcctggtccatcaacgagctgatcgctaagggctaccacgacgccgacgcgctcgccgccgtcagcaaggtggaggccaaggacgccgacaccgcggtgatcacgctcaagacgccgaactccaacctgttgtggaccctgaccggtcgcgcagggctcgtgttcgacaaggacgccaagtatgacctgaagacgcaggccgtcggctccggcccctacaccgttgccaagttcgtggaaaacagctcgatcacgctgaaggccaatgagaagtactggggcaagaacaaggccaagacgcccaccgtggtcgtcaagtatctggccgacgacaacgccgcggtcaatgcgctgaagtccggtgacgtgcaggtgctcgccccgattaccgagaacctcgccgaaccgttcaagtccgattccgccaagtacacggtcaaagccggcaacggcaccgacaagttcgtgctcggcttcaacaacgcttccggttccaaactggctgacaagcgcattcgccaggccatccgttacgccatcaaccacaaggagctcatcgcctctcgcggcggtgcggacaaggcgctcggcggcccgatcccgtctctcgaccccggctacgaggatctgacgaatctgtacccgtatgatcagaacaaggccaagtcgctcatggctgaagccggctattccaccgacaagccgcttcaacttacgctgacctacgccaacatctacggcaccgagctcggagaccagctgcgctcccagctcaagcccatcggcatcgacctgaaggtgaatgtggtggagttctccacgtggctgcaggatgtgtacaccaaccacaccttcgatatttcgctggtggaccacaacgaaagccacgacttcgcatcgtggaccgatccgacatactatttcggttacgacaacaagaatgtgaccaagctgtacaacgagggtgttgccgccacctccgacaaggagcgtgatgccaagttcgccgcggccgccaagcttgtctccgaggatgcgccggccgactggctgttcaactaccgcatcaccaccgccacggccaagggcgttgaaggattccccttcgacctcaaccagaccgttctgcccctctacaacgtgacctacacgaagtagttcgttacagcaatgagctccctcagtgagggggctcattgttaatccaagtaaagtaggcattatgcgattcgtgttgaaacggctggcgttattcgtggtggcgttgttcggcctgtccgtggtggttttcgcagcattgcgcattctgcctggcgatgtggcctccgtgatggccggcgtcaactcgccgcctgagcgtgtgacccagctacgcgaacaactcggtctgaatcggccattgattgcacaatacttcgattggatgagtgcgctggcccgtggtgacttcggcacttcaatcctgactggtcgctccgtaacctccttggtaggcgcacgtgcgtccatcacctttcccctgattattcttggcctgctcatcgccttggccatcggcttgccgctgggctgtgcggcggtactggcccgcagcgcaacggtgcgtgcggtgtttcatgtactggctattgtcggcggtgccgtacctgcgttgtggggcggtctgctgctgattctgttgttcgggcgcggcgtaggattgcttgacgtgtttccctcgcaagggttcccgctggatggctggggcgcacccggttcggcgatatcagcgttggtattgccggctgtatcggtcggcatcatcgtgggagcatcgcttatgcgatacacgcgcgcggccttaggggatttagccagttccggctacatcgatatggcatgctcgtgtggcatgacgcgcactcaggcggtgttgcgtgtgggattgcggttggcaaccccgcagctggtgtctgttatcgggctgaccttcgcttcgatggtcactggcgtgatggtcatcgaaaacctgtttgcgttaccgggcatcggcaacggtcttgtgaccgacgtgggcaaccgcgacctgattgccgtgcaaagcgagctgttcctgctggccgcgttctttttgactgtcggcctcgtggtcgatttgctccaccgcgtgctcgacccgcgtctgaaaaccgctaccgccattacggaggtgaccgcatgagcaatgttcgtcgtgcgacgactggtggtcgacgggctgccttcgtcatcgtcctgcactccatgtggcgtcgtgccgagggcaaattcgcacttatcgtgctcgctctgtggttgctcattgccatcgtttccctgttctggaccccgcaatcgctgtgggccactgatggctaccatgtatgggccaagccgtccgccgagcactggctcggcactgacggcaccggcgcggacgtgttcagctggctgctggccggctcacataccaatcttgtgatcgtgctgctgaccgtagtggcatctatggcttgggggctgctgctcatcgcggccatggtggcgcgcaatgcggcgctcgccagttcttcggtagtggtagttgatgcgttgatttccgttcccaccgtgttgattgcgttgattctggctgtgccgttgggagcgtcaatcgcggtgattgtgatcgcctgcggcttcggatatgggttgaatctggctcgtgtggctcgccccgcagcgttgctggcgtcccgctcgtcatatgtggaatcggccttggccaatggtgccagcgggtggcgtgtgctcataagccatgttatgccgaatattctgccggtattggctgtgcaactgtcattgtcggcgggcacggcggtgttggctgagtcggggctcacttatctcggtatcggtgtgccgtccggtgtgccgagctgggggcattctctggccacttcggtcaaactcatcaacgtgttcccattaaccgtggtgtggcccggcctgatcgtcacggttgtggttgtggcgctgaatatttttggtgatgtgctgcgcgatgccatcgatccggtcaccaaccccgcattacgtgaaataggaggcgaacgatgagcgtcgatgttcgcgggctgaaaatcacgattggcggcaaaccaatcgtctctgatgcggatatgaccattgccgacggtgaacgagtcggcttgatcggttcttcaggctccggaaaatctatgattgccaaggcgatgctggggttgctgcccctgaccgctgtgactaatgggtcgattgatatgggcggcacggaaattatcggagcttccgaacgtgcgcttgccgacctgcgcggccggtatgtgggtgcggtgttccagaatccggctgcctcactgaacccggtgatgaccgtggcgcagcagatcgccttgccattgcggttgcactatgatctgaccaaggccgaacgagccgaccgagtgaatgccttgttgagcaaggtcgggctggatctcgatatggccggcaaatacccgcacgaactgtccggcggccaacagcagcgcgtgggcatcgccacggcgctgatcacctcaccgcgattcatcatcgcggacgaacccaccaccgcactcgactccatcacgcaacgccagatcgtggacctgctgacctcgctggtggacgacgccggtgcctccatgctgttcatcacccacgatttctccgtactcgcgcgtgccaccacccgctgctacgtgctggacgccggccgcatcgtcgaatccggacccaccgccgacctgctcgccgcgccgaccacaccacaagcccagcgcctggtcgccgccgcccaaaccctcaccctccacacccccaaggaggattcgcatgagtaacagcagtgtgccgctcctctccgcccactccatcaccaaatccttcggcccgcgcaccgcacgccaccaagtcctcttcgacgtctccgccgacgtccacgccggcgaatgtctggccgtgatcggcggctccggatccggcaaatccacgctgacccgcattatgctgggcttggaatccgcggactccggcagcgtggaatacgagagccaatccattgtcggcggccgaaaatcgccgggattcgcggccctgcgccgcgaatcgggactggtgttccaggacccgttctcctcgctcgacccacgttggcgagtcgccaaatcagtggctgaaccgctgagtctgcaacggcgtgacctgaacaacaccgatatcgacgagcgagtggccgcggctctgaccatggcaggccttgaaccggcagacttcctgaaccggtacccaatcgacctgtccggcggccaggcgcagcgcgtggtcatcgcccgcgctatcatcaacgagcccaaagtgatcctcgccgatgagccgatgagcgccatcgacgtggccgcgcgcattcagatcctcgacaccttcgccgccatccgcgcggcccggccgagcaccgccatcatcatggtctcccacgatctcggcgtggtacagcacatcgccgaccgcatcctcgtgctccatgacgggcgtctcgaagagacgggttccaccgctgaagtgctcggcaacccccaatccgattacacccgtcagctcatcgaggcagcctcgttatagaccttttttggctccctctctgaggggagctgtcgaacgcagtgaggctgaggggagttacgggtgccgtcgtattcccctcagtccgcttcgcggccagctcccctctctgaggggagccgaggccgccggcgacacgcgcttgtcgcgggttgtgctatggtgtgagacatgcagattatctcatgttgttgtcgctaaccgacgcccctgggcgagcggtcagtgacgcataacttgagatagagcattcgaatcgcggcaaatctgtcgcatgaattttcatgaaatcgatggcacgagcgtaaccgtgtaacgtgcgagccgtggttaacatgaaaaaccgattcactttccggcttcaccgtacagtgagcgggaatactcgatttcaaactaaagccacagtccattcgtctgggaacgtcggttcacgaacgcaacgcagcaaaaccccacaaccccagcaacgaaggacttcacatgaccatccacaacagcctcgcagaactcatcggcaacaccccgctcgtcaagctcaaccacattccgcaggcgaccggcgtcaaagccaccatcgccgtcaaagtcgaatacttcaaccccggcggatcctccaaggaccgcattgccgaacgcatcatcgacgccgccgaacagtccggccaactgaagcccggcggcgtgatcgtcgaacccacctccggcaacaccggcgtcggcctggccctggtcgcccagcagcgcggctaccgcacgattttcaccctgccggacaaggtctccgaatccaagcgcgcggtgctgcgcgcctacggtgccgaagtcatcgtcacgccaaccgacgccggcccggacgacccgcgctcctactaccaggtcgccgaacgactgaccaatacgattcccggcggcttccgcccgaaccagtacgacaatccgaacggcccgctgagccactactacaccaccggacctgagatctgggaggccacggaccacaaggtcacgcacttcgtggccggcatcggcaccggcggcaccatctccggcaccggcaagtacctcaaggaagcctccaacggcgcggtcaaggtcatcggctccgacccggaaggctccatctactccgcttcctcacgcgacgaagtccaccagtacgatatcgagggcgtaggggaggacttctatcccaaggccttcgaccggaacatcaccgacgacatcgtgcgcgtgtccgacgccgaggcctttgaaatgacccgccgtctggccggcgaggaggcgctgctggtcggcggctcgtccggcatggccgtggccagcgccatcaagtacgcgcttgccaatgatttggacgagaaccagatcgtggtggtgctcgcccctgattccggccgcagctacttggagaagatcttcaatgacgactggatgcgcgccaacggctacggcgacatcgtggagcgcaccagcaagccctccctcgccgagcagtaccttaacggagctccctctgatgagggagctggggacggactccataactagctatcaaaagaatcaataccaacatccgcactaaccaatcgcacctgttctaccttcgaatacggaacgatcccgaaaggaacccaatatcatgtccgctgaatacaacgccaagttcgtcaacaccgacatcgccacccgcgccatccacgccggccaggagcccgacccgaccaccggtgcggtcgtcacgccgatcttcgccacctccactttcaagcaggatggcgtgttgggcctcaggggaggccacgactactcccgctccatcaaccccactcgcaccagcttcgacgagcagctcgccgccgtggaaggcggcaagtacgcgctgagcttctcctcgggcttggccgccatcgacgtgctgctgcgctccaccatcaagcccggcgacaacatcctgctcggcaacgatgtgtacggcggcacctaccgcctgctctccaaggtgttcgtgccgtggggtgtgggcctcgacgtggtggacatcaccgatctgaaagccgtggaaaccgcattggcctccaagcactaccagtatgtgtgggtcgagaccccgtccaacccgctgctcaacatcaccgacatcgcggccaccaccgaagtcgcccacaagtacggcaccaaggtcgctgtcgacaacaccttcgcctcgcccgcccttcagcacccgctggccgatggcgccgatgtggtggtctactccaccaccaagtacatcggcggccactccgacgtggtcggcggtgccgtggtggtcaacgatgaggagacccgcgagaaggtcgccttcctgcagaacgccgccggcgcagtgccctccccgttcgactcctggctggacatccgcggcctgaagaccctggatctgcgcgtcaagcgccacagcgccaacgccctgaaggtggccgaatggctcgaatcccagccctctgatgtgattgagcgcgtctggtacccgggcctcgagtcccacccgggtcatgaaatcgccgcccgccagatgcacggcggcttcggcggcatcgtctccgtgcagctcgcggccggcgccgaggcggccaagcacttcgtggaccacacgcagatcttcacactggccgaatcgctcggcggtgtggaaagcctcatcgaggtgcccgccgccatgacccacgcctccgtggccggcaccaccctgcaggtgcccgccaacctggtgcgcatttcggtcggtatcgagaacgccgacgaccttatcgccgatctcaagcaggcgttggatcgtatctgaccgtactgacggtactggtggcaccgtattgacggtgccaccacgcttatcggcggactcgctatcgattggtacctacaaaaaatccccggcccacaagggtcggggattttccgttatcgattaaacatattgaatcagctggcgttgccgccctgccatccagtggcatccgcaccagccgggcgcaacgtctgaccggaagtcggtgtggtgccatcaacgaccacacgagtgccgatggtggcaaagtcgtacatccacttggcatcggccacctgcatgttgatgcagccgtgcgagcctgggataccctgctgcacatagatggggtgctcgccccacatgtatgcaggaacaccgtgcagagcctcgccgccgttatagtaggaaacccacggcgtgcctggctggttgtagccttcgccaaccatggtctgcgattcgtacttgagatacacgtagaacgtgccggtatcggacagcatggaaccatcggcggtgggcttgccagaagcgatgttgaacttcttgaccaccgtggtgccctgatatgcagtggcagtctggttcgtcagatcaacatgaacccacttatcgccatttgccgtatcgaagttatgaggcacctcgacctgcttgacatcatacgggctgtctttcacagccacagtggaatcagtggactggttctgctcgatggcggtagccagacgttcgggggcgtccccggcgccagtcacttcaataccatccacgccgagtgtcttatcggcaccaatttccacgccgccttcgtctttcggcgtgatgtagacctcgcgtgtcaccttgggaacagtcagttctttggttacactgtcactggtgacgtacttggtgatggcatcgcggtcgactaccagactcatggtgccttccgccttattcgccgtgggcttgaggaatgaggcaatggtatcggccgggatggtgacgctcttgttcacgccgttgtccacggtcagtttgaggccaagcctggcattggcgtcaaactgtgtttgctgtgcgctcgcgtcatcaatcggattctttgcggtctgtagcttgaccggcaccgtcgcattttcgcccggggtcgcgacggcctccttgactgcagcattgacaacattgatatccgggcccttgccatcctgacccgcggtgtagtcgaactgcttggtgctcttgttgtagacaacggtggcaatctgcgctcggtcggcctcatcgaccaggccggcggtgacgaattgttcggcagtctctttgtccgtggtggcggtcagagcgatatgcggctgatcgaaaatattgagcttggccacgtcgccggtcttcgcgttcaacagcgcatccacggttttatccgtgtcgacggtgacgccaaggtccttcagcgaggctttgacgctgttgccttcggcggtgaacgtcaccgtggtgttattcagccgctgcttcacagtattcgcaagttcttcgcgggtctggcccatgacagagacgttgcccaaatgaacaccgggcgcagccttgtcttggaagtaccaacgtccgacgaagaaataggctattaatgcggcaagcaacactgcaaatatggttatgatggcaatccgtgcggccttgccatgtgatttagcggtggcagatgccataacatgttcacccacataggctgtattgtcggcatggttattggtgccactgtcactttgctgtggtgtggcggtacctgaatccgcggctgcgaacagcccatcggtggccacaggctgcagcaccgccgtctcctgatcgtcaggagaggagaaggaaaatgtatcgttggccataaaatgccccgtcttagttctctcaaagcggcatatcatgcgatatgccgggaataacgttccttgacgcataataatacggaagggctacgtacatcgttgcgaggtattccgttatacgatgaaatccagccgcggtcggcctacactggtcgtttatgacagcacatcaggcggcgctggaggcgctcacacgatacttcggctatgactcgtttaggcccggacagcaaggaattgtcgaggctttgcttgccggacgcgatgtcttgggcgtgatgcccaccggcgcaggcaagtccgtgtgctaccagattcccgccgcgctcagcccgggtgtgactttggtcatatctcccttgatttccctgatgcgcgaccaggtcgatgcgctgaacgacctcggtctgccggccgcgttcatcaacaccactcaaactcccgacgagcaggcgatggtgttcgcccaagccgccgccgggcagatcaaactgctgtacgtggccccggaacgcttggaaaccgggcgattccgcgactttgccgcccgtacgccgatctcgctgatcgccgtggacgaagcccactgcgtctcccagtggggtcaggacttccgctcgtcgtacttaggtatcggcgatttcatcgccgggctgccgcagcgtccaccggtgggtgcgttcaccgccaccgccaccgaacgggtgcgccgggacatcgtgggactgctgggattgcggaatccggccgtcaccgttaccggattcgatcggccgaacctgtattttgatgtggtcaaactggaaaccaaatacaaggccgcatgggtggcgcggtatgtggccgaccatccggacgaatccggcatcgtctactgcgccacccgcaagaccaccgaagcgctcaccgacacgctgaaccagatggggcatccggccgtcgcctaccatggcggcatgtcgccgggcgcgcgtgaggcggcccagcgcgacttcatcaccgacaaggtgccggtggtcgtggccaccaacgctttcggcatgggcatcgataagtccaacgtgcgttacgtcatccaccacaatctgcccgaatccattgaggcctactatcaggaggccggccgcgcgggccgtgacggcgagcccagccgatgcacgctgctgtggaatgagtcagacatcgtcacccggcgtcggttgctggataacgattatgagaacgaacgattgactcccgaagagcaggaaatcgttcgccagtccaagcgccggctgctggacggtatggtcggctactgccgcaccaccgactgcctgcaccggtatatgacccggtatttcggtcaggaattgtcgccgaatgctggttccacggcgggtgaagacattgcggcggactcttcgcagtccggcaaatgcggtgcctgctcgaactgcgaaagcacgttcgagaccatcgacgtgacccgcgtggcgcaggcgatcagccgttgcgtgcatgacgtggggcagcgcgtcggttccggcaagatcgtcaggatcctgcgcggttcgcgggcacaggatctggcatggctgaacccggagcggatgcccaccttcggcatgctcaaggacgtgaacgaggctcgcgtgcgcgacgtgttgagccagatggccacggacgggtacctgtcaatcgccgaagggcgtatgccaatcgtcatgttcggtgcgcgggcggccgaaaccgccgctcccgacttccactatgagatcaaacgggtggaacgcaagtcggaggcggccggttccggtcggagcgggggagtggctgatactgccgattccgccaatgttcccggcgatgcgctgggctcgtatatcccggacgatgacgaggaatcgctgttccagaagctacgcgaactgcgacgcaccatcgcccaggaaatcggcaagccgccgtacatcgtgttctccgacaagaccttgcgcgacatggcccgcatcaagccggttaccaacgcgcaatttctggcggtcaacggcgtcggtcaacacaagctcgacctctacggccagcgcttcatgcaagccatcgcctcgttcaatgccgggagtgcgtcataacaatctcctatagcgaactgcggagtatttgcgggcgttcttgggctggctcgactacgatgactgttcgatgcttcatgaccgaacactcggcaagtagaaaggcaacagcatggcagaagaaacggccgaaaagcccgtcgtcgaatcattccagcttgatcacaccaaggtcaaggcgccgtacgtgcgttacatcgacaccgaaacgggccctcacggcgacgtgatctccaactatgatctgcgcctgacccagccgaacaagcaggccatccccaccggcggcctgcacaccatcgaacacaccatcgccgtgctgctgcgcgaacgtatcccgggctacatcgactgctcgccgttcggctgccgcaccggcttccacctgctgacctggggcacccaccccaccgaggaagtggccaaggccctgaaggaatcgttggagttcatcgcgtacaaggccacgtgggatgacgtgcccgccaccaccgagaagagctgcggcaactatcgcgaccacagcctgttcaccgccaaggaatgggccaagcagatccttgaggaaggcatcagctccgacccgttcgagcgcaaggtcgtctgatcgcaagccaatcggcatggaagaaccccgcccccgcataccacgcggacggggtttctttgtgcctatgtttgtgcctatggcatggtaggtttgccgtcagttaatcgttggccgctgcacatcggtagcttggcatgttggagaggtggaagtgactcagtcgaacgctgcaaacaaggcgacaggccgccgtttccgccacgccaccatgcgcgatctgccgcagatgcagaaaatctacgcacgcgcacgcgcgttgatggccgccaacggcaaccccacccagtggggcaacgaatttccgcgtgaatcgatgattgaggacgacatcgccaaccagcgtacgatgctgctggtcgacacctgcaatggccacgaacgcattctggcccagttcgccctgtgcccgggcgaggatccgacctacgccaaaatcgacggcgcctggctggacaacgacgcctatgtgaccatccaccgcatcgccgcatccggtctggtgcgccacgcggcccgcgactgtatcaggtgggccctgaagcactacggcaacgtgcgcgccgacacccaccccaataacaaggccatgcagcacgtgctcgaaagctccggcttcgcccgttgcggcctgatccagctgctcgaccggccggtcgacaccaccagaatcgcctatcagcgccacgagtggtgagtgtggctgccggctgatgtgctcgtttctgcaccgtcatcggtttctgacggtagaatcagtgtgtgagaagaacacgttgggtcggggggcgtcgtgacggtgcttgcggctgtcatgctgtcgtcgtgcggcggcgtccagtcgaatcccgggtaacacaccgttgccaatccattcaccgcgcaggtgaatggagaagacatggcgatgcctgtcggccgatggagccccatcggccgacaggcatcgaggaagtcaccgtggccggcggaacgcgcggtcgccgattggggcgaatggcttgtgtggttcgctttggtaccagtaggcgaccgtggccacgtcgtcctgtcgttcgaagttgccggcttcctcggtgccgatctgctgccattcgacgcgcaggtctcgctcgaagtagatcgggtcggggatgtgccaacggtataggccgcgggtcacgggggtggcagtgtcccagtaggcgctttcgcgtccggcgaggttctgcgagtagaacgggaagccgaggtatgggccggtgaaggtgcgctcgtgcatgcggccgtgttcgtcgaattcggcgaagctccaggcaccgccgaagtagtcctcggcgccggtgctgcaccaggtggggtatttgccgtcgccgtcgatgtagaacttgaattcgccttcgccccaccagcggctttcgagcgcggtgagcgccaggtaggtgccgacgtaggtgccgtgtccttcgacgccatcgagcaccacgtagtcgtgggcgagttcggtgacgcgttggcggcgccactgcgcgtggaagcgcatcgtgtcggccggcagctggtcgtattcggtgtagtcgatttggtagaagaacgcgggcacgtcctcgttgtggtcgttgcgcagcacgatgcgcgcgtgttcgaacggcatggcgaagtagcagttgaagccccggttcgggttgaccatgacgggaattgagttgatggtgcaggactgggcgtgtccgcagcagaagaagtcgccgatcgggcattgcaccgagggggagtcctcgccgtcccagtagaattctaggatcaggttgcgtagcacgtcggggccggtgggggaggtgcggtcggttaccgtcatccagatgtgacgaatcacgccggggccctcgatgtccatcaatgtcaccgattccccggacctcaccgtgctgatgcaggggcttcccttgcgggaggggcccaacgcgctggccgccatggccgcgcggcccttgccgccgtccgggttttcggcgttgatgcagcgggtgcggccgggtgccctcatggccacggcatccaaggcgccttgtccgagccccggcgcggggttcgctgtggtgaatgcgtcgagcatgatgcttacttcctttcctgtcgcaggcccggcccgccacggcgttttgtctggggcgggctgggctgctgggggggtgttatttcacggcaccggcggtgatgccctaggagagcttgcgctggggtagtgtcctatatcttgtgcactttggtcttcgcccgtccctgcggcgatgatcggttcgcttcccatacggtctcaccgagtcttgacatgtcgaggtagcggcgcgtcgaccactcgttcgacgtgacatagcgcacgcgcgcgcagacgagcatcaacgcgctgcgtccgtcggggaagctgccgaccacgcgcgtgcgccgtctgatctcgcggttgcgggggtgaccctggcgaggacgttgcgctcgaagcggaccatgcaccgctggtagcgggcatcgcgttcaaggcctcctcgacgctttttctgcccatccggtccagggtggtctccggcatggcctcatatcgcaaaaaccgtacgctgaaagtgactcagcgtacggttttcacgaaagcagccatcggctatcggtcagccgagcagtcctcagtcctcagtcgcagcgaccttggcgtcagccccggccttctgctcaaggccgagcttggagcgcttgcggctgtagccgaagtacacgatcaggcccagaccgaaccagacggcgaaacgcacccaggtctcccagttgagaccggcgatgagcacgaagcagaatacgatggccagaatcggggtgaccggcacgcccggcgcgcggaagccgcggggcgcattcggctgggtcttgcgcatccacagaataccggccgacacgatgatgaacgcggacagcgtaccgatgttcaccagctcgaacagcacgttgatgttgatgaagccgccggcgaacgcggtcagcagaccgaagaaccaggtgcccttgaacggggtgcggtacttctcgtgcacgtggccgaagaacttcgggaacaggccgtcacggctcatggcgtagcagatacgggattggccgtacagctgcacgagcatcaccgtggtcatgccgatgagggcgcccaggttcacgatcaccgcgagccagttcatgccggtctccagaatcacgccggccaccggggcgtcgatgtacttggcgaactccttgtagggcaccacgccggtcatgatcagggtcatgatgacgtagagcacggtggaaacggccagggacagcagaatgccgcgcggcagcgtcttgttcgggttgatggtctcctcagcggaagaggacacggcatcgaagccgatgaagctgaagaacacgatggaagcggccggcacgatgccgtacggctgggtggagccgggctggaaagtgtagatgccgtacggggagaacggctgccagttggacggcttgacataccacacggcgcacacgatgaacagcacgatgatggcgagcttgatgagcaccatcacgtcattggtgcgcttggtctggttgatgccgatggagagcacccacgtgatgatgagcacgatgacgaaaccgggcaggttgaagtaggtggtgacgtccgggttggtgccgtaggcggcggtcagctcgaccggcaggtgcaggccgaagccttccagcagtttgttgaagtagcccgaccagccggcggacactgtggccgcctgcagggcgtactccagaatcagatcccagccgatcacgaaggcgatgagctcgccgaacgccagataggcataggagtaggccgagccggacaccggggccatggcggcgaactcggcgtagcacagaccggcaaaaccgcagcagacggcggccagcaggaacgatacggacagggccgggccggcggtcagcgcgcccttgccagtgagcacgaagataccggtgccgatgatcgcgccgatgccgagcatcgtcagatcgaaggtgcgcatcgtgcgcttgaggggagtggattcggcgacaagctgatccacgcttttcttacgaaacagatccatgttcttctctcatgaaatctaggattatggggctgaaccggacggatttccgggatcccggcacgcctcaacgccgggaatcaaaggcggcttccgagaaaccgcatatcggtcattagtgtacgactgccgggcgaaaacagacgattgcgactacacgtcacattctcgcgcaacaataggtgtctatgagcatgaacgcagcacctgaaatcgcattctcgtccgagcagggcaaggccaactatgcggccgcccgccgccaataccccgcacaggccatcgtggacctcaaaaccatgcgcgacaacatggcccacctggtctccgtggtcggcgggcccgcttccggcacggcggtgatgggtgtggtcaaggccgacgcctacggccacggactgctgcccgccgccctagccgcgctcgccggcggcgccacatggctcggcaccgcgcagtcgcacgaagcgttgctgctgcgcaagctcggcatcggccccgaccgctgccatattttgacttgggtatacaacggcaccgaagtcccgttcgacgagctgatcgccgccgacatcgacgtatcggtcggctccctgcccggcatcgacgcggtggccgccgccgcacgcaagctcggcaagcccgcccgcgtacacgtcaaggtcgattccggcttcggtcgcaacggtttcacaccggccggattcgacgccgcgctcgccaaactcgtgccgctcgccaaagagggcgtgttgcatattgtgggtcagtggagccatctcgccgtggccgattcgcccgatgtgtccgaattcgtgtcctccaccgaccgccagatcgaaacattcaaggacttcacgcgccgcatggaacaggccggcattccgccggagatccgtcacctggccaacacagcggccactttggaccgcccggagattcacttcgaactcacccgccccggcatcggcctgtacggctacgagcccgatcccgcgatgggcaccccgcgcgactggcatctgaccccggccatgcgcctgcaggcgcagctcggcacggtcaaggatgtggaggccggccacggcatctcctacggccgcacctacctgaccccggacaacacctcgaccgctattgtgccgctgggctacgccgatggcatccaccgctccgcttccggtttcgatatggaaggtgccaagcacgtggagaagccgggcggcccggtgcgcatcatgaccaccgaaggcccgaagatctaccgcgtgtgcggccgcgtgtgcatggaccagttcatcgtggacctgcacggatccgccgccgaactcggcgttcacgagggcgacacggtcgaactgttcggcccgggccgcggcgaggattacgttgagcctaccgccgacgattgggcccgcgccgccgacaccatcagctacgagatcttcacctgcctgcgcaaccgcatcccgcgcctttacgagcatgccgccgaagtgctgcccgccgccgacctcgccaaactcgaccccgccacgctgctataaggtgcattaacgccatacggtggcaccccgtaatcccttcttcccgaatatgtgccactgatatgtgctgagcgtcacatattcgggaaatcggccccaatctcccgaatatgtgccgttgagttgacgtcagtggcacatattcgggaagtcgggattactgcggccgatatgtgtgcctatgcttggcatatggaaacgactttggatggggaacaggtgctgagcgacgagggctacagcgccttcgacgaggagcgatgggcacccgagccgcccaaatccaagtcacgcaccgcgttcgagcgcgatcgcgcgcgactgattcattcgtccgctttgcggcgtttgggcgcgaaaagccagattctgattgccggtaccgacgatttcgctcgcactcgactgacgcatacgctggaagtcgcccagatcggtcgccaaatcggcgcattgctcggctgtgatccggacgtggtcgactgcgcctgtctggcccacgaccttggtcacccgccgttcgggcacaatggggagcgtgcgctcgccgacatcgccggcaatatcggcggcttcgaaggcaacgcacagaccatgcgtatcctgacccggctcgaacccaagatctttcacccggacgggcgttcggccggcgtgaacctgacccgtgcggccttggacgcggccgtcaaatacccgtggaccttggccgaagccgaccaacacccaaagggggagcggtcgaagaaattctgcgtctacccggatgacgagccggtattccgatggctcaagatcggcgcgcctcaggctaccaagcccatggaatgccagatcatggacctttcggatgatatcgcctactccgtgcatgacgtcgaggattccatcgccaccggcgcgttcgatccgattgtgctcgccgatccgaagatgctggaccacatcatcgagcagacgcgcgcatggtatggggcgaagtgggatgccgacaagctgctggccgcgttcacgcgattgcgccgagagcatttgttccctgcacatttcaatggttcgcgcgaatcgttggcgcagcttaagaacattacgtccgatttgatcggccgcttctgctggtcggtggaaaccgccacgcgcgacacgtacgggcccgggccgttgacccggtattccgcgaacatcgtgattcccgagaacacgaattacgagatcgtggcgctgaagggcatcgccgtgtacttcgtcatggcgcctcgcgagcgcgagccattccatcaggaggagctcaagatcgtatcggatttggtcgatgtgcttatggccgattcgccgctcccgtccgacgctttggaaagccagttcctggccgattggaacgaatccaccaacgacgacgaacgactgcgcgtcgccatcgatcaggtcgcgagcctgaccgacaactccgccctggccctgcactccattttgtgctgagggcgtgttgggcaggcgcttccctcagtctcgctgcgcgagccagcttccctcgggtgaggggagctgtcgctgtaggcgactgaagggagtttcgcggaagaaatgataaccgacggtaaaaatttaccgtgtctcaggtgaggcggtactctagagacttatggtcggaatgattaagaaggaagatgtcgagaaggtgcgcgccgccgcggacctgtatgacattgtgtctgcgaccgtaacgcttaagccctccggcaccggcaccttcgtgggcttgtgcccgttccacgacgagaaaaccggcagcttcaacgtgcgtccctcgctcggcgtgtggcactgcttcggctgcggcttgggtggcgacgtattcaaatacgtcgaacaatccgaaaacatcgacttccgcgaagccgtggaactgctcgccgacaagtaccatatcgagctgcactacgagaacagcggcaatggcccggcgcgcgagaacaccggctccaagcgcacgcgactgctggaagcctgcgaggaagcccagcgcttcttcgtctcccagatcttgaccaaggaagcactgcccgcccgcaagctgcttggcggccgcaacttctcccaagctgattgcgaacgtttcggctgcggctacgcgccgcaaggctgggataatctcgtgcgccacttggcctccaaggggtttacgcagaaggaaatcctcgacgcgggcttggcccgtcaaggccagcgcggcatctatgactatttccgcggccgagtgacctggcccatccgcgattcgaccggccgcacgctcggcttcggcgcgcgcaagctgtatgaggacgaccagatcgccgccaaatacatcaacacgccggatacgcagctctaccgcaaaacccaggtgctttacggcatcgatttggccaaatccgccatcgtcaagaagcggcaggtggtgatcgtcgaaggctatacggacgtgatggccatgcacttggccggcatcgacaccgccatcgccacgtgcggcacggcgttcggcgccgagcacgccaagattgtgcgccgcctgatcgccgacgattcgctgggtgcggtccagctggtcgggccgttgaaggtcaaggaccagccgttgagctcgcgcatcgtgttcacgttcgatggtgacgccgccggccagaaagccgcgctgcacgctttcggcctcgattcggccttcctctcccaaaccttcgtggccgtggccgacgacaatctcgacccgtgcgacctgcgcattgagcgaggcaacgaggcagtgcgctcgctgatcgcccgggccaaaccgttgtatgatttcgtgatcgacgccgccatcagccggttcgatctgacctacacgcccggccaagtgggtgcgatgaaagccgtggccccgctggtggcgcagattcgcgaccgctccctatgggacgcttacgcgcgcaagtccgcgggccgtatcggcgtggaccttgaggtgatgcgccgcgaggtaatgaacgcacgccggcagatgcatgtacgcgatgaggacgcctacgcgcccaaacatcgattcgagcgtgacgagccgcgtgtggaacccggcaccaacccgtacgccaatccggccacgcgcaaggcgttggagcgccgtgacgccgccgaacaggcgtatttcaagattgacgacgccgtattcatcgccgaacagcagttcatggccgtgctgattcaggtgccgcgcgccatcgaccgcaccatgttcgggcagctgaccatcgaccatttcatgacttcggtgttccgcaccctgttccaggcgatcgcggccgccggcggactgccatccgacgataccccgcaggggctgtggatgcacaacctcaccaaggccggcgggccgatgctcaatcaggtgatcaacgagctggctgtcatgcctctgcctctgcctggcgacgacagtggcaacggtacgcagcctctgcagtcgaacgcgcccggcggtgctgccgccgtgcagctgcgccctgccgcgccggaagagcagcgctatgccaccgagctcctcacccgactactggacatgggcttcatgcgccagatcggcttggccaaacgccgcatggcccaactgcccgacggcgaagagaagataaccctccttggccaaatcacccgtatggagactgctcgcaaagatctccaagcccaaatctatggcaacaccgttggctaataatctctccctctgacgagggaggttactggccgcagtcgggcggggcgagagaagcgacgtcagatatatcgcgcagcatcgatgtcacatcaactattcgtttgatattaactttttaatgacaaacgataaattatggtataatgcaagtatgaattgcttggtttgcgcaatgaagcggaggctcaatcatggcaacgacaaagaaactatccttcggtttggataaggccggtggcgcggccttgatcctggcccgcatcggtgccgcgctcctatggatcatcgcagcgctcgcggccgtggtgtgggtggtattcctcatttccccgcgctcgttcgccgcgaacttcggcagtgtcgacctgaatgtcggcggcgcgttcaccctcagcatcaagggcgacttgttggactactcctataatctgcagaacttccacgacggtcccgtcaacatggtagctaccatctccaccggtctggcgagaatggtggtctacgctctactggccttggcgttctccgaaatggccgcactgtgcaaggatttgacggtgtggcttgcagacggcagggatgccacgcctttccaaggcatggtgtccgaccggttgaacagggctggctggtatctgattgtcgcgccgattgtgggtctggtgaacttcatcgtatgtttcctggctggcacgggcggcaactggggcttatggatgagcggcatgatggtgatgattggcattatcctgttgctgattgcgcgcatcttcgattatggcatgggtctgcaacgggaagtcgacggtctgctgtgagggggaagagcgccgtagacccgcgtggcgccggtccgaacagggccggtccgaacaccgagggcccgaatgaggacagcctgaacatcgttgattcgagcgagaccggcctgaatgcggctgactcaaactccaccggtccggccggcataggccatatcgtcctgcgcctcgaccgcatcatggtcgagcgaggccgctcactcaactggctggccgatcaggtgggcatcaccaacgtgaacctttccaaaatcaaaaacaatcgcgtttccgccatccgcttttccaccctcgccgccatctgtgcggcattggattgccagcccggcgacattcttgaatatgtggatggcatttcgggcgatgcggacgatgcgaatagcaagtaatcgcacgcatgccaactcttctcctcctggcctgtgattgattgacaatcagggattacatgccaaatgggagagataaacgtgtggaggttggattggatgggtgcagaagttgcggattggccccatccaaattggactggtttgggtggggccaatccgattcgttcaataatgaagcgcgataccaagcagcgtcgaaacgaagggaaactcatgacgcagaatcgtgcggaactcaaccgtaatctggcccaaatgctcaagggcggcgtgatcatggacgtcaccacgcccgaacaggcgaaaatcgcgcaggatgccggcgcgtgcgcggtgatggcgctggagcgcatccccgctgatattcgcgccgccggcggcgtctcccgtatgagcgacccggccatgatcaagggcattcaggaagccgtctcgattccggtcatggccaaggtgcgcatcggccacatcgccgaggcccgcattctgcaggccatcgaaatcgattacatcgacgaatccgaggtgctttccccggccgacgacgtgtaccacatcgacaagaaccagttcgacgtgccgtttgtgtgcggcgcgaagaacctgggcgaggcgctgcgccgcatcgccgagggtgctgccatgattcgtaccaagggcgagcccggcaccggcgacgtgattcaggccgtgcgccacatgcgcaccatgaacaagcagatccgcgaacttgtcggcctgcgcgacgacgaggtctacgaggccgccaagcagctgtccgtgccttacgatctggccaagtacgtgcacgacaacggccgtctgcccgtcgtgaacttcgccgccggtggcgtggccaccccggccgacgccgccctgatgatggagcttggtgccgaaggcgtgttcgtgggctccggcatcttcaagtccggcgacccggccaagcgcgccgccgccatcgtcaaggctaccgccaactggcaggacgccgatctgctcgccaagctgtccgaaaacctcggcgaagccatggtcggcatcaatgaggacgagattcagaccatcatggccgctcgcggcgagtgagtgcattaccttggctcccctctttgaggggagccaggaaagggtgacgctcccgccagcgggagtcaaggcccaaggagacaacatggttgtagctgttgaatatatttccaaagaagaatccgcggacgccaaaaacgccaagcacggcgtgaccggcatcctggccgtacaaggcgcattcgccgaacatgcggcggtgctggacaagctcggtgcgccgtggaaactgctgcgcgcagccgaggatttcgatgaatccatcgaccgcgtgattctgcccggcggcgaatccactacacagggcaagctcctgcattcgaccggactgttcgagccgatcgccgcccacatcaaggcaggcaaaccggtgtttggcacttgcgccggcatgattctgctggctaaaaagctcgacaatgacgacaacgtctactttggcgcgctcgacgccgtcgtacgccgcaacgcctatggtcgtcagctcggtagtttccaggctactgccgattttggtgcagcggatgatccgcagcgtatcacggacttcccactggtattcatccgcggaccgtacgtggtgtcggtcggacccgaagccacggtcgaaaccgaagtcgatggccacgtggtgggcttgcgtcaaggcaatatcctggccaccgccttccacccggaactcacggacgatacccgcatccacgagctcttcctgtcgctgtagtcgattcgtctgccgttagactggtatccgattgacgaatcaaggagacgatctgccatgcagcttgagctgaatcgacgcagcaaggtgccgatgtaccggcagctggccgccgagctgcgtgaacagatcgtctccggcgcgatggccgagggctaccgcctgcctcccgaacgcgagctgtcctcacgtctcgaagtcaatcgcaccacggtgttgcaggcgtatcagcagctcaaggacgaaggtcttatcgcctccaaagtcggcaaaggcacgttcgtgctgccggctgcctccgcaagccgaacatcgcacacgtcaaacagtgacttcgggaatgcaataacgcgaacaacacgatcgtcggcagaaatgggaacatcgcaagcctcctcttccggcgacgtagaacgtgctacctccactgatttcttgacgacagaccagggcagcagctctgcggcggtccatacgattcgtgaaagccgttcggttcagggcccggaaccaaccgtcgtgcgtccgccatggtcggtgttgttctctgattattccaaccggtttacctaccatgacatcgcctcggccgagcgggcgcagcgcggcgacaccattattgacttcgccaccggttcgccgaacccggcggatatcccggacgatctgctgcgcaaggtcagcatcgaagcattcgaatcgcgggaattcgacggccaaccggaatcacctatcgagggattcgaagagttgcgtgcgctgcttgccgaacatatgcgcgcacgaggcgtacaatgcggcgtccgcaacgtgatggtgctctccggctccgagcagggcattgacctcatcgtgcgcgcgttcatcaaccccggcgactgcgtgctggtcgaacaatccacgttcttcccggcattgcagaccttccgttcggcggatgcgcgcatcatcggcgttccagtggacgagcacggtatgcgtacagacctgttggatgggtattgcgcgcgattccggcccaagctcatttacaccgtcccgacgttccaaaaccctaccggtaccacgctgtcgcccgaacgacgcagcgaactcattgacgtggcgcggcgctatcagtgtctgatcgtggaagacgatgcttacggcgatttgtggtacggcggggaatcgtccgacgcgcatcgccccataccgcttaaaggcatggagaatgcgggatacgtgatgtatttgtcgacgttctcgaaaaccgtcacttcgggcctgcgcacgggatgggttgtggccgatccgcatgtgatcaaccggctggcggctctgcggcgcatggtcgaccagcatacgagcacgtcatcgcagcgcatctgcctggaactgcttaaagaaggccgcatcgccgaacatttgcgcggtttgattaaggcttaccgcattcgacgagatgcagcaatcgcagcattggagcagtatgcgccggatgaagtgtattggaccatgcctgcaggtggctactatatttgggtttctttgccggacggcgtgcgctctctggatgtattggaatcctgccgttcccaaggcgttacgttcatgccgggcagcgtgttcgacgttgacgaaatggatgattcccatattcgtctcaactttgtgcgcccggatgctgctgacattgataccggcattcgaatcattggcgagacgatagcacagatgtagtcaagtgactggctcattgcggttgtcgagtttttttttgatggctacatacccacatcgatgggtgcattcgacgaataaataagcgaggaagccatcatcagttcgctgtggcatgcgcatagcgttgtcgggcgaacgggacagaccacgtggtcgttgcatgatctggtcgatcgagccggcatcgcattgcccctggcatagtggcgaggtggcgcagtaacgagtcacgccatcgcgagccgatgatgcgaaatacggaaccggtcgcggccatcaacgggtatcatacatgtggaagcaacgatacgttggcgtcagcacatccatctgacttcagaaagggacacgatatgaccacatcctccgtttcgccggtgaccactgaactggcgggcagcgaaaccggcatcacgcttatcattcacgccggagcgggcagtcgtggcaagcacagcacgcctgaacgcatcgcccaggtcgaacttgatctgcagcgcgccctcgatgccggataccagttgttggaatccggagcaccggcgcatgaggctgtggtcgccgccatccacgtcatggaagacgctcccgaattcaacgccggccgtggtgccgccctgaccagcgatggcatcgcccagatggacgcctgcctgatgaccggcgatggcgaggtcggtgcggtcaccggcgtaagcaccgtgaagaacccgatcgatgcggcgcgtgccgtcaaagagcagaccaagcatgtgctgttcgcggacccgaccgatgcagaaatcgccgattggggcgtcgcgaccgaaagcaacgagtacttcatcaccgaacagcgtcgtcagtccttggccgaggctcagtccggtggcgatgagtgggagaagcatggcaccatcggcgccgtggcgcgcgatgccgaaggcaatatcgccgccggcacgtccactggcggcatcaccaaccagatgcacggtcgtgtaggcgattcgccgctgcccggttgcggcacgttcgccaaccagtccacggtggcggtgtcctgcaccggcatcggcgaggcattcatcaaggtggtcgccgcccatcaggtgtcggatcgtgtgcgtttcgccggcgagaacgtcgaggatgccgcgacggccactttggacgaagtcgccgcgcatcatggcgatggtggcatgatcgttctgccggcggtcggccgtggcgtggtcgcctacaacagcgagatgatgaacttcggataccgtagcgcgcaaggcggtaaggtgcagggctgattgccccctgtattgcggcatataacatgaatggccggtgtgctgcggattcttggtaaggaatccgcagcacaccggccattcatgtatgcggcgagtgccgccgatcggtgcggcagtgtgcgctacttggtgatcgtgttatacgtgggcatgttcgtgtaatcgaactgcacgttctttacgttctgtgcagacacggcggcgacgttatcgcaccacagcggaatcgatggcagatcctggagcagggtctcctgagcttcctgcagggcggcggtacgtttgctctcgtcggtctgggagagggcatccgcaagttcctgatcgaacttcgggctcttgtaatcgccgtcgttggagccgtggccgtccgcggaagcggaggagtacagcggcgtcaggtaatcctctgcggaaggataatccagcatccagccggaacggaatgcggtggcgatggtgcgatcggtgacgcggtcgcgaatatcgctgaacgtcgggtacgaatcgccctcggcgttgatgccgagcgtgttcttgatctggttcgccacggcgtccacccaagccttgtggctgccatcggcgttgtaggcgatcttgaaatcaccgctccacggggagatcttattggcctgagcccacagtttcttggcttcctcagggttgtattccagattggcggcacccttcaggtccttggaatattcaggaaccagtggtgaagtgaaatcggtggccacggtcttggtgttcgagaacaccttgtcgacgatctgcttgcggttgatggccatggagatggcctgacggcgcagctgaccctcctcgtcaaaaccgaaatgatcgagtcgttcggggatgacgaagccctgatacgtggaaccggcctggctgtaagcggtgacgttcttggcggtgcggaacgtcttgactgcggacgacggcacggcgtccagcacgtccaggttgccggccagcacatccgcgtaggcggagtcctcgtcggtgtacacgcggaattcgatgccgccgttcttcaccgtgcggctgcctttgtaatcagggttcttcaccaccgtgatgcttttgctgacatcccaggacttgagtttgtacgggccattgccgatggggttcttgccgaacgccttgatgtccttgtatgccactgacggcagcgggaagaaggattggtgcgccagctgcaccgggaacaccgaatccgagtggttgagcgtgacgaccagtgtgtgatcgtccttgacctccaggccggacagcttcgcgtcatcgctgacattcgggtcctgcagttcgtcgtagcccttgatgatggacatgcggctcgcctgcttcatggcgtgcttgacgttcgccgcatagctccaggcatcggcgaaggaactggcggtaacggcctcgccgttggtgaatttccagccgtcgttgatcacgatggtgaactgcgaagcgtcatcgttcggcgtgatcgacttggcgacttcgagatgctgcttgccgttcacgtcatagctgaccagaccctcaaacaggtaacggatgaccttgccgccacccatttcgttggtgtcggcgggaaccagcgggctctgcggctcggtgttgttgacggaaatgatggcttctcccgggtttacggtcgcgccggaatcggacttactaccgcaggcggccacggaaaccagcatcacacatgctgctgccatggcggcgaaacgtttgaccgggaataatggggtaatacgcaacttcatcgctcctcttcctcgaatgaaactatgttccatcggtatgagccagccacgtacggtattcgcgtctggcctgtcacacaatgatgcagccgtatatacgggcacagcattgcgcggcagttcattataaggaagacatgcaaactcaatgtttccttgtccaaataaagaaaaaacgagcgcggctgatgtgcggcaccggtccaaaaactcatgtccgccagcgcaacgcgactacgtaccttatgccggtctgcgcgtaaaatagaacggctgcgatattgggttattcacggaggaatggatgcgacgctggctgatcaatgtagccaaaaatgagacgattctcatcgtcgccgcaatactcgccctgatttcgtgcttcattgtgccgccggacgccgattacaaaagctacattcacgccaacaccatcagccagctcatctgcctgatgattgtggtgtgcggattccagcgtatcggcgtgttccgcatcatcggttcgcgattgctggagaaggtcagcaccatgcgcggactggtcattacgcttgttgctttgacgttcttttcctcgatgttcatcaccaatgacgttgcgctggtcatgttcgtgccgttcgcggtggccgtgctcatcatggctgggcaagaggataagaccaggcgggttctagtgaacgtcgcaacacctgaagggccgagccgtaaagaaaacgccggaggcgttttttagacgagtcggaaagctgcggccccaaccggcagtatgtacgcggccgtgaccaagaccatgcgggcatactgccgttagccgccccccccccaaaaaaacgaccgtatgcccgcagccccttggtcgcagccacatacatactgccgtttgccgcaggtcgcatcgatcaccaaccacccgcgtaacaaacccggcaacatgggacgtgcacaatggcgcacatgggtgtgagcttcgaattgaacggtgagctgtgcgcgggcggcaagggcccgcgcgacctgatcaccgacgtgcccggcgtgcgggtgggccatgtgacgttgtgcggcgattcgccggacggcccgctgcacaccggcgtgaccgccattgtgccgcccggcgactgcttcgccgacaagctgtctgccgccgcatacgtgtccaacggcttcggcaaatccatgggactggtgcaggtcgacgagctcggcagcctggagacgccgatcctcatgaccaacacgctctcgtgcggggcctgctacgacgcgctcgtgcgccacgcgctcgaccggcacgccgagatcggcgtggacaccggcaccgtcaaccccgtcgtcatggaatgcaacgacggcccgatcaacacgatccgcgcgatggccgtcaccccgcagcacgggctggatgcgatcgccgccgccggcgacacgttcgatgagggcgacgtcggcgcgggaaccggcatgacctgcttcggattgaagggcggcatcggctcgtcgtcccgcatcgtcgcgttcgacggatgcgactacacgatcggcgtgctcgtgctgacgaacttcggatctcggtcctgcctgcgcatcgccggccggccggtcggacggctgctggccgaggccgaggacaaggtggacgacgaccccgacaagggcagcatcgtcgccgtgatcgccaccgacctgccggccgactcgcggcagctgcggcgcatggcgaaacgcgtgaccgtcggcatcgcccgctgcggcggatacatcggcaacggaagcggcgagatcgtcgtcgcgttcagcaccgccaatcgcatcccgcactgggccggcgaatcacgcggcggcgcggcggcgccgatgatcgacaccgtgcgacggcttagcgacaacgcgatggacgactgtttccgcgtggtcgccgccgccagcgaggaggccatcgtcagctcgctatggcatgcgcacagcgtcgtcggccgcactggcgagaccacctggtccctgcatgacgccgccgggcgcgccggcgtcgacatcctgtagccgacatcctgtaactgaaaggaacaacaatcatgaccaatcccatcatccccgtgttcgacggacacaacgacctgccgtgggaaagccgcgacaaccgccactacagcgtcgaaggcatcgaccaggaactgccgcagaccctgcacaccgacatcccgaagctgcgccgcggcggttacctcgcgcaatactggtcggcgtacgtgcacagcgactacgccggcggcgacgcggtgatcgccacgctcgagcagatcgacttcgtgcaccgcatgtgcgcgcgctaccccgagaccttcaagctcgcgaccaccgcggacgacgtgcgcgccgcgcaggacgaaggccgcatcgcctcgctgatcggcatcgaaggcggccatcagatcgccaacaacatggccgtgctgcgcgaatacgcgcgcctcggcgtgcgctacatgacactgacctggaacaacaccaacgaattcgccgacgcggcggtcggagagcacaagtggcacggcctgaacgaccgtggccgcgagatcgtggccgagatgaaccacatcggcatgatcgtcgacctgtcccacgtctccgccgacacgatgcgcgacacgctcgccgcatcgaagctgccggtcatgttcagccactcctcgtgcttctccgtcaacccgcatccgcgcaacgtgcccgaggacgtgcagcgcatgctcgccgacaacgacggcgtgcagatgatcaccgcagtgcccggattcgtgtccgccgccgtgcacgagtgggtcgccgccggcgagcagggcccgcgccccgcagtcagcgtcaaggatgtggccgaccacgtcgaggcggcccgcgacgtgatgggcgtggaccatgtcggcgtcggcggcgactacgacggcaccggtgcgatgcccaccggcatggaggacgtcggcaagtaccagaacctgttcgaggagcttcgctcgcgcggctggagcgaggacgacctcaacaagctcggctggaggaacgcgctgcgcgtgctcgaggccaacgacggcgcgtacaaggcgttcatggccgcgggggagtgagtcgccgggtgaactgccgtgcgtccgtcgcgcgtcgacatcttcgggttcggctcgtcgaacctgagcggacaggacctgcagcagaagctaaagaactggattggctacaatgtatcggactggttcatgcgggacatgacaacgaaggagttgatcatcatggccgatccgaatcgtccccgtcattacgaggaggagttcaagaggcagatcgtgcagtcgtaacgggaacggcaagccgtcgtcgcagatcagggcggagtacggcatcccgcgttccacgctgcggcgttgggtgcaggggatacgtaacagcggctccacgaaagcggccgacaaccgcactcccgaggagaacgagctgatcgaattgcggaaacgcgacaggcagctggagatggaggtcgatgtttcagaacaagcggcaccggtattcgcacgaaagcaggcgtgatacggtccgacgccggccgctgcccggtatcggcgcagtgcgggatcctgggcgttgccaagtcgacctgctactgggtgctcgaacaccccgaggccgagcgcgccgacccttacgagaaggatgtggagcgcgtgtggagggacagcggcaaggtgtacggggccaggaagatcaggcacgccctggggcacgagggcgtgacgctgtcccgccgccgcatcaaccggatcatgaaggggaacggcatggccggctcctgttccaaggccgcctataggccacgcccggccaggccgaacgacgacccggctcccgacatcctcgcccgcgagttcaatggctatgcgccgcgcacccatctggcctccgacccggcctacgtgagggtcggcagttcgtgggcgtacgtctgcctgcccggcgacctggccaaccggcagatcgccggccattcggtcggcgtcgggcacgacgccgatctcgtgccggccgcgttcgccgcgctgcgcttcccgctggatgagatcgaggtgttccacacggaccgcggcggcgagttcaccggggaacgcgtcgaacgcgtgctcgacgtgttcggcatcacacgttccctttccagacccggcaacccatacgacaacgcggtggtcgaatccaccaaccggctcgtcaggaaggaactcatccacaggaacgtctacacgaacgtggagcaaccacgctcggacgtcaaccggtacgtgtggtggtacaaccaccaacggctccactcgaccctcgggtacctgagccccgtggagttcacacaacaaggaaaaaccctctagaaacagtccaacacaccgttgccaatccaatggatcagcccgttgcggtcgaagatgccgtacgtgtatgccggcgccttccgctcggcgaccagtccgtggaagatgcggtcgatctcggcgatcgtcgcctgatcgggaatgtatgcgtgtgacgatgtcacggtgatgcccctgtgtcagaactcgtagtcgccgctcgggccgatggtcagggcgagatcgtgggtgcgaccggtgtgcatcgcgtcgttgatcgcctcgacctgcgccgcgtccacctcgtacggcctgccgtcgagctcgcacaccgggatggcccagccgccgtgcgtcatgaacagatggtcggcttcgcgcagttcggccaacggcagcttgcggtattcgaccttcttgccctcttcgagcgcccacgcgaacagttcgcgctgcgaggtgccgttgaggatgccgatgcgcgggtcgggtgtaacgaacgtatcgccgtactggccgacgatcgacgaattcgggcattcgagcgtgaacccgtcggtcgtgtactggatcgaatcgccgatgccgcgacggtcgcacagccgatgctcggactggctgatcgcatagctgagcgtcttcgcgccgttgagcagccacggcgccttcgcggtcacgtcggacgcgtagccgcgcgacagcgagatcatggtcagcggctcgagcgaatgcagcaggcccttgccgtcgaggaagatccacacgctgggcaggcggcctttgcccgcgccgacgccggtggtcggatcgtagccgcgcgagacgaggatgcgcagcatcgggccgggctcgggatcgtcgtaggcggcgatcaccgtgttgacggccgcggtgaacgcgtcgatgttcggctcgggcaggtcggtcatcgccgcggacgtggcgagacggcgcagatggttctccagcgagaccggaaaacccttccacacggtcgtggcctcgaagatgccgtcgccgcgcagcacgctcagatcgaataccgagacgtgcggctgctccgggtcgacaagctcgatcacgtccttcggatcgaacggcgtgcccttcggcgcgaacagcgcggccgaattgccgattcccaatatgattcccgtcatgatgctccctttcgcaaacctacacatggacattgcataacctagtctcctggtattatcctccctcccattcgacgatatccgccggtaacgtgccggacacatagcgcgtcctgcgccgccccgattaacacgatgcgcgaatccgcgtaatgaaggtttaatgtcgggttcctaacgttgcctgtgtcaactgacggaacacgaaacgcggaagaaggcacggatggctgaggggacggctgaagccggcatggatcggagagttgaaccggaggcggaactgggggaggccacgtcgccggccgtcgcccgcgacctgttccgcggcggcgtcgtacggccgacctgcggtatctcgaaaggatacgcgcaggcgaacatgatcgccctgccacgcgaatacgcctatgatttcctcctgttcgcccagcgcaaccccaagccgtgcccgatcctcgacgtgctcgacccgggatcgccgacgccgtccatcgccgccggttcggacatccgcaccgacatcccgctctaccgagtatgggagaacggcgaattggtcgacacgctgcccgacatcaccgacgtgtgggcgagacacgacgatctggtgacgttcctgatcggatgcagcttcacgttcgaattcccgctgatggaggcgggcatccccgtgcgccacatcctcgccggacgcaacgtgccgatgtacaacacgtcgatcgcatgccgtcccgccggacggttcagcgcgaacatggtggtgtcgatgcgcggcatccagcccgaccgcatcgccgacgcggtgcgcatctccggctactatccaagcgtgcacggcgcacctgtcgaggtcggctcgcccgaacgcatcggcatcacggatctcatgcatcccgactacggcgacgcgccggtgctcgaggacggcgacgttcccgtgttctgggcatgcggcgtcaccccgcaggccgcggtgatggcgtccaagccgacgttcgcgatcacgcacgcgcccggccacatgttcatcactgacgtgcctgaccgcacgtatatggtgtaaacagaacgcgcagcgagtcttgctccccctgaggggggctggcggcaaagccgcctgaaggggtgatctcccgcggacggctatgacttacagatacggccgaacaatcatcaaggagaggcagaatgcgtatcgacctgaacagcgacatgggcgaaagcttcggacggtggaagctcggcgacgaccacgccctgctcgacgtggtgtcgagcgcgaacgtcgcctgcggattccacgcgggggacccggcgggcatgctgcgcacgctgtcagacgcggccgcgaacggcgtgtgcgtcggcgcgcacgtcgcctaccacgacctcgacgggttcggccgccggttcgtcgacgagcagccggccgacctgacggccgacgtcatgtaccagatcgccgccctggaggggctcgccgccagcgtcggcacgaaggtctcatacgtcaagccgcatggcgcgctgtacaaccgcatcgtgcacgaccgcaagcaggcgcaggcggtcgtcgaggcgatcatcgccgtcgacccgtcgctcgccctgctcacattgcccggctcggtggtcggcgaactcgccacgaacgccggattgcaggtgttccgcgaggcgttcgccgaccgcgcgtacatgccggacggcacgctggtgccgcgcacgcaggacggtgcggtaatcagcgacgtggacaccgtggccgcacgagtcgcccgcatggcgtccagcggcgaggtcgaggcgatcgacggtacgacgatcacggtgcacgccgactcggtgtgcgtgcacggcgacagtccgagcgccgtcgccatggcccgcgccatccgcggccgtctggacgccgacggcttcgatgtggcgtcgttcatccggggttgatcgcgatgggtgacatgcgcatccttcccatgggccagtccgcgatgctggtcgagctggacggcctcgacgccgcgatggccctgttcgccgcgatcgaggcgcgtcgaaccgcagaaatcgcaggtccgcatgacggcgtgcgatatgacgtgttcgccggcgtccgcgaggtcgtgccggccgcgcggacggtgcttgtgcggttcgatccattgctgaccgaccgcggtgcgctgtccgccgcggtgcgcggattgacggacgcggacgtctcagtggaacggacgacgaaagacgtgaccgttccggtcatgtacgacggcgaggatctgcaatcggttgcggatctgctgggcgtgtctgcgcaggagatcgtcgcccgccatgccgggcatgcgtggcgcgcggcattcggcggattcgcgccaggattcacctatctgaccggcggcgaccccatcttcgacgtaccccgtcgcgccgacccgcgcctcgaggtgcccgccggcgcggtcggactggccggcacgttcagcggcgtctacccgcggcaaagctccggcggctggcagctgatcggcacgaccgacaccccgatgtgggatgaacaccgcaccccgcccgccctcatccaacccggcgacatcgtccacttcacccccgtccgcgactccatccgcagcgtcgaagcgcccccgcccgatcatgaagcgtcatccccacggcatggcatcaacggaatccgtgtggatgatccgggcatgttctcggtgttcgaggacgacggccggcatgcggccacgatgggcgtgaccggatccggcgcgtccgatccgcaggcgttccatctggcgaacgcgctggtcggcaacccggccggcacgccggcgatcgagacgaccggcggcggactgcgcctcaccgccctcggcgacgtcgtcctggccgtcacaggcgcgcccatcggcatcgtcatccacggcacagatggcagtcgcaccgcgatcggatcgcaggaacccttcctgctcgccgccggagaacaggtgacgctgggcataccggaccacggatggcgcgactacatcgccatgcaaggcggattccacgtcgaccgcgtcctggacagcgcctccgcagacacgctgtcgagcatcggcccgaaagcgttgcaacgcggcgacacgctcgccagcgcgcatctcccgttcgcctccgtcggccagccgcagccatggcccgacgacctgcccgccagcggtgatctcgtcgagctcgacgtgacgttgggaccccgcgacgactggttcaccgcgcaaggcgtcgccgacctgctcggcgaggaatggaccgtgaccatgcaatcgaaccgtgtcggcctgcgattgcacggcgaccgtgcgctggaacgcggcgtcatccgcgaactcgccagcgaaggcatggtgcccggcgcgatcgagatcccggcgaacggccagccggtcctgttcatgcgagaccagcccgtcaccggcggatacccggtcatcgccgtgctcaccgaacacgccctcgcgctcgccggccaactccagcccggcgtacgcatacgattccgcgaataccgcaaggactgcaaggagcagtgaatatggaacgagtactgatcgccaaccgcggcgagatcgcggtgcgcatcatccacgcctgccacgacagcggacgcaaggccatcgccgtctacgccgacgccgacgcgaatgcgctgttcgtccggctcgccgacgaggcatacgcgctgcccggcaccacgccggcgcagacctatctcaacatcgacgcgatcatcgccatcgccagaaaagcgcacgccgacgccgtccaccccggctacgggttcctctccgagaacaccgacttcgcccaggccgtgctcgacgccggactcgtctggattgggccaagcccgcacaccatccgcatcctcggcgacaaggtcgaggcgcggcgcatcgcggccgaggtcggcgcgcccatggcccccggcaccatcgtgcccgtgcacgatcccaaggaggtcgtgcgcttcgccaaggagcacggcctgccgatcgccatcaaagccgtgcacggcggcggcggacgcggtcttaaggtggtgcgccggctcgaggacgtcgaggaggcgttcgaatcggccacacgcgaggccgaagtcgcgttcggcaacggcgactgcttcctcgagcgatttctcgaccggccgcgccacgtcgaagtgcagatcctcgccgacacgcacggcgacgtcaaggcgatcggcacacgcgactgctcgctgcaacgccgcaaccagaagctgatcgaggaggcaccggcaccgttcctgtccgatgccatcaccgaacacctcaagcggaccgccgtcgcgatctgtcggaaagccggctacgtgagcgccggaactgtggaattcctcgtcgccgacgacggcacgatgtcgttcatggaggtcaacacgcgcatccaggtcgagcatccggtcaccgagatgaccaccggcatcgatctggtcgccgaacagctgcgcatcgccgatggcggatccatcgccgacctcgaaccgcaactgcacggtcacgcgatcgaatttcgcatcaacgccgaggatcctgcgcacggcttcgtgccgttccccggccacatcgacgatctgcacgtcccgagcggccccggcatccgcttcgacacggggatcgcggtcggaaccgacatccccgaccagttcgattcgatgctagccaaactcgtcgtctacgcgccggatcgcgacgcatgcctgcgccgcgcccgccgtgcgctcgctgaactgcggatcgtcggcgtgccgaccgtcatcccgttcgacaaggccgtgctcgccgatccggatttcgcctcgcccgaccatctcggcgtatacacgcgatggatcgaggaatcgttcctgccgcgcatcgacccgtccacgctgaccggcgacggcgcgctgcaccgcggcggcgacggccggccgatgacccgcatgtggatcgaacttgacggcaaacgcgtcgaactgggattgccgtctgccttcgcggccggtgtcgctgccggaagtttcgccgggggagcaagggccgccgattcagtcagcggcggcaccgagacggccgatgacccgtcggccgacccggacacgatcgtctcgatcatcaccggcaccgtcgtgcgatggctggtcgacgacggtgcgacggtcgccgccgacgaaccggtcgtcgtactcgaggcgatgaagatggagacccagatccccgccccgcacgccggcatcctgcacacgtccgcagccgtaggtgcccaggttcgcttcggagaccgactcgggcacgtcgagtcggcataaaacggcggcgaagccggccccctctgacgagggggcagccgggcggagcgtattcatacacagaagaggaagcaatcatggcatcggcaatacaagcaacaaaggcaccggctcgcaaggggagtctggcctgctaccgctggtatccgaaggtgtcgaggatccaggccaaggccgcgcaggacgtcggccgcggcagcgagaccttgatgacgttcgcgcgcggcgacctgttcaaggccgcccgccgcttcgtctccggagagtcccgcaaggcgctggtcgtcaccggcttctacatccccaaggccgagcatcccgccgccgaatccgacggtccggtcggcgcgaccgagatatgcgcggcgatccgcgacatcggcggcgacgcatggctggtcagcgacgcatggtgcgagccggtgatccgcggcgcggcgaaggacgtgctgccacaggaccacgtactgatcgcacccaaaggcgactcgttcgacgcatggctggacgggacgaaaacgctgatcgccgagcagcacatcgacacggtcatcttcatcgagcgtgtcgggccggcgtcggacggctacccgcgcaacatgcgcggcatcaacatcctcgagtggaccgcgccgctcagccggctcgcctcgctcggtctgcacacgatcggcatcggcgatggcggcaacgagatcggcatgggacacattgaatcgtatgcgatcgaggatatcgtcgaccatggcgacgagatcgcctgcaccgtgcccacgcaggagctcatcgtggccggatgttcgaattggggcggccatgcgttcgtttgctcgctctacgccatgggccatcgtgaggtcgccggcctgcttgacgagcagtggcatcgcggcgtgctcgcgaacatcacggccgccggcggcttggacggggtcaaacttgtcaacatccccacggtcgacggtctgtctgaacgccagtactacagccagatcaacgccctatcccagctcgcacgctgagtttgattgaatcggcctttagccgatgcgatccatggtcaacagggtcttcggatggttgtcgtcgatggattgcagcgggtgtaactcacgagccagcgtcttctcatccatcacggtgagtgacacctgatagtagtggtcgctctcgggatccggtgtatagaagtcgacttccgtggaaccgaccttgccgatatgcacggttcgatggcgtcgcagcagttcgagatacaccacgttctcgatccgatgtccgaggtccccggaggttttgccaaggaaccagaaccggaacccggggtcgcccagatagtacttctccatggcctgcaggtatgccttgcccttgatgtcataccggttggcgcggaatagcaggtagttctccctcattgcggcgatgtattcgcctaccgtggtgggggatatgcctcgcttcgtctgccgcatcgagtcggccacgcccttgaccgaggtgatattgccggcgttgtcggcgaggaacgatgcgacgtcgttgaacgcagccgtgtcgattttcggatggcgtcgatcgatgcgcatggccacctcttccataaaacctttacgaaatccgaaacccttgcggccggtcgcggaaaccggccgtgacgaaacggtcggaacgggagaccaaccgacagtaaggctgaccggccgttttgcgaaaaacggtcggaaaacagcacgccgaagcggttctgctggcgtggtttgacgctagaatcagtcaagattaacggaaggtaaattcacggaggaatccatgcgacgatggctgatcgagctgcttaaaagcgaaacgatcctgatagtcgcctccatactcgcgctggtctcctgcttcatcgtcccgcccgacgccggctacaaggactacgtgcacatgagcacgatcagccagctgagctgcctgatgctcgtcgtctgcggcttccagcgcatcggcgtgttccgcatcatcggctcgaggctgctgcatcacgtcaacaccgcgcgcggactggtgatcacgctgatcgccatgacgtacttctccgcgatgctcatcaccaacgacgtggcgctcgtcacgttcgtcccgttcgcaatcgccgtgctcatcatggcgaacatggaggataaggctgtgctcgtcggcgcgctgatgaccatcggcgccaacgtgggcagtatgctcacgccgatcggcaacgcgcacaacctgtatctgaaggcgctcaccggcatgccggcgtcggagatgatcggcatcatggcaccgtattctgcgaccgcggcggtgatgctggtcatcatcagctgcgtcgtgttcggcaaacagccggtgtccgaattccagtcgctcgacggcactggcatcgaacaaggcgtgctcgcgccggaaagcggcaagcaccagcccgacgagatccgtatcaccggctacggtgcgggctatggcggctggcgcaccatcgtctacacgctgctgttcgtcgtctgtctgctcgccgtcagtggcttcgtccccctgtgggccatgtgcgtgatcgtgttcgccgcgttcctgatctgcgaccgcaaggtgttcaagaacgtggactggggactgccgctcaccttctgcatgttcttcatcttcatcggcaacatgaaacgcgtgcccgagttctaccagctggcgcgctcgctggtcggcggccatccgctggaagtggcggtggcgtccagccaggtcatcagcaatgtgcccaccacgattctgctttccggcttctgtgaccaatggcgcgatctgatcattggcaccaatttgggcggcatgggtacgctcatcgcctcgatggcctcgcttatttcttacaagaacgtcgtgcgccagtacccacacaagaaaggccggtatctggccgtctactccgccgtcaacgttctgtttttggccgtattgctgaccttgagctggatcatcgagccgagtttctgagcccagccatctccaccccgctgacggggggctgccggcgaagccgactgggggtctaccgcgcgtatacggtgggggagccggtcagtcggctcatggccgactgcgggatgtcgtggatgcggccgatggtggcatccagcgtggatacgccggctgcggtggctgtgttggattcagaggtgatgctggatacgccgactgcggacgatgatacggacgcaaccatcggctgacgataggcgttggagttgcgggccagccgggcgagcgcaggacgctgcctgcggaacagattgataaacataccgcacactccttcatcgttggccggcggtcttctggccgccgtggattccatcctgccctcctgcgcttgtattcgctatgggggatagcccctattattccctgaatctgcacgattccccctcatccttgagggtgattctaacggcaaaggcatcggcctaatggccgatgccaatcagcgcgaaaccaccagcgtgacgctgtacggcttgatcttcatcgccagcaatgaagacggcgacggcaatgtgtaagcccgacgttccggcacaatcgcccccgaagcctcgccgcggtatccgatagtggtcttcgccgtcggattggcgcttaacgtcgtcacctccaaacgcaccggtcgcgatggcgaggcgcccagcccggccagtccgcgcgcgatttccaacgtcacatccaccggggaatcggagatattgacgattttgatgtaacggcaggcgtcatccctgtcatgcccggtggcgctgacatacagatgtttggcggggcgtgacgcggtctgctcgatggacacggcatacgtcgtgtcgcccagatgcgtggaaaacagccgctccacctcataattcaccgtggggttcacatgcgccggattgaattcgataagattctgcgcccaccccttagccggaatatgcgcgagcagcggcgcataggaggtcatgcgcaccacgtcggaattgcgctcgcagccggtcaggaacgcggcctcgccgagtgccgacttccacgtgttcgcgccttgttcggtctgtggttggccggcaaaatagccgttggctgaatattcgccgaaatagacgccggcgccacaacgcgggtaagcgtcgaatcgtgacgcctgggatgcaaaccattcgggggagtggtaggaatgctcgtcgacgataatcgcgtcaccggtggcggaatcatgtgccccggaatcggttgcggccaacgctcgcgcatggtcccagctgcgcttcatcgccggctggaaggggaacagtccggcgctcatcacacacagcatatccgggtatcgttcatgaatggcctcgctgatcatgtcaaacttggccacgtagtcagccccgaagttttcgttgcccacgccgatcatgtccaagccgaacggctcaggatggcccatatcacgccggaccgcggcccacgagctggactccggatcgccattcgcgaattcgatgaggtccaggtagtcctgaatcacattgttgcggaaggtggccgaattgatatccatgtggcgcggatctcggccgggcgactggcatgcgatgccggcgaacagagtaggcagcggcttggccttgaggtcctcgcacaggcagaaatattcgtagaaaccgatctgatagctctgcgaatagctggaaccatccggcatcttgaacgaccacatcgaatactgttggcgtcgcgcggccagagagccgacggtatccttccagcgatactcattgccgggcgtcacaccttcgacgatgcagccgccggggaatcgcagaaacgctggatgcaacgcctgaatggtctccaccaaatcgcggcgcagcttgccgtaacgccatttcgggtcgcccgcgccccaatagtccgcatccatgaactgcaccagatccagatcgaacgtggtgcgttcgccggcgtcaatggtgatacgcagcttgccgtaatcggtgttcagtccggttacgtcggcgttgaaccggtaccagccgtcacggccgatgacgatggcaccatccgacgaatccggactgatcgaaacgccggaatcctgcgcatcggccccatcgtcctgcctcagaccggtctcttccgtatcgtcaagcggatcggagtccacgatatacgacaatcgagtgatactggtgagcggcaggccgtacctatcgaccacgccgacggacagctcggcccgcccatgaaccggacgtaccgcgagactgacggaataggtgtggtcggcgacgatggagaacgcgggctcgcccccgttgtcgccgcctccgttatagccgaggttttccagatatgcagggccggtttcggaaggaacatcggacgtgatgcgagcgtatcggctatgtgcgtgaattggcggggcggggcagtcggtggtcacccgctggccgtgaatcccgcgtatctcactgccaaggctggcggcggaacagttgatgaaatcccagaaacgcagggaatcagcctgcgtacgccaccgttcggcaccggccatacgccacgtgtgatggtcgagataaacgccgtcaaaactgtagttgttcaccatgttggcgttcagcccgccatccgcaccatggttgatgtcctcgaagaacacgccgtacagccgcccgcttgtgtgatgggtggggcttcccacgctaatccgcaccatggtttcgattgtagagggaatggagcggaaaggtaaacggaagagttcgctcaccgttcatgttgcggtcaatccaagtcgactgttcgccggtatacagccggtaacctcgaaacaggaatggaaaatacggacgactaggagcgcggctgtgcaatcctcggtgggaatacgtgagcgcatcgaccacgtgtatccgtcgctgcgtccggcggagcgcgccgtggcccagtatattcggaatcatatcgaggaggcggccgacctgaccgtcggtcagatggccgacatcgcccacgtcagccagccgacggtgattcggttcgcccgcaagctcggcttcggcggttaccgtgaactgcggtacgtgttgcgcaacccggccgccgaacacaaagtgaccttcaatccgctggccggattcgatctgaatccgtgggatggcgaagatgagattcccggtaaagcggccgatggcgcgaaggcgctgatcgacgagctgcacagtgcgttggaccccaaggcctatcgcaaggcggtcgccctactcgccgaatcggagttcatcgacattttcggcgtggagaattcgttgacaccggcgatggatctgttcaccaagctcggctacctgggactgacatgccgtctcaataccgacgcttacctgcagcagatcggtgccgggcacctgccccacggcgctgtggccgtcgccttctcccattcgggcagttcggcggatacggtcaaagcgttgcgattggcgaagtcgcatggcgcgaaaaccatcgccataaccaatgccatcggcgcgccgctggccagctgggccgacgtgacgttgctgacgggtcgtgattcgcacacgatctatggcaatgcgattttctcgcgcgtggccgataccgcgctcgtggacatgctgtacatgggcgtgattctgtccggctatggccggttctccaccgcgctcgacgaatccggtcgcatgattcgcgaccgcgtattcgagaactgagctgctgctttatcgcgccttgggccgtattgctctggtcgttgctgcttgggttgttgacgatttggtcgttgtcgccctggtcgctaccgtcctgaggcatgtgccagcgaatacgtagtggacttggcgtgcgtatgacgttcgatcttgccgctcaactccagctggtccaagagctgcgtcatctgatccttgttcaggccaagcgctttctgcatggttttacggctgagcttcacaccgcggaacgcgaggaaattgagcgtgaactgttccaacgtttgaggcgacggttccagcgttgccgtatcaagcgggcgggtactggcctgatcgtcaccgtccgggcgttcgccgaatccactgccgagaatcagcgtctgcagtggcgcgcagccgatgatgcgtgcgccggccaaagcatctgcggcgttatccgtcatgcgctgaatcgtggggaatgagtacattttggcatgctgtgcttcgtcagtggtgctgggcgcggcggaagcatcggcatcggtccgatgcgaggacgcggcctcggccgatacagggataggcagtaccattgccaccgaagtggggcccacgcgcagttgcggactgaccgcgctctgcgcgtaggcgtccataatgcgttgaatgccggtaccgcagttctcgcagaggcccaaatcggcgaacaattcagccaaacgcggggtgcgtggctggcatacgccgttgagtagatcgttgatttccaaaccatcggtcaggccgccgagcgacacgatttccaagcgggaatcgaagatattgatcagtgtggggccggagtacgtgtaatcgcgatgttccagtgcgttgaccaatgcttcgcgcagggctatggccgggtattggccggattcgttgatgccgttcagcagggcgctggcttggtcgagctggcgcagcaccgagccggtgaatgtgtgacgttcgcgaatggcgtttttgccattgccctcgaaaatggtggccttgataacgaacgggcattggttggacagcagggtggcaagcgacgattcggtggtgctggtgaaggtgttgttggtgccggtgttggtgatgctgccggcggggacattaccggcatcggcagagacggatgcagccatgttggtcacaaccgggctttcccaatccttgccttcactggcaaaacgaccctgtgcgtatgtgaaagtgagctcaccgctatcgcctgcgacggtctggcccgatgcggcgtgatctacgttgctctccgttgtccccatatcgccgatggtaccggtgcaagccgacgttacgccgaggtgttttacacccctacggctagacttacacgagtttggccccgtagctcagctggatagagcatgtgacttctaatctcaaggtcgacggttcgagcccgtccggggtcacgatgtaataagcccttggtccctcatcgtttgtgaggggcaggggcttttgaatattatgccggtctgggtccgtctggagcctgaactgtcgaccttgagattagaagtcacatgctcatcaccaccatccgggaacacccttaaggggtgcgtctcctgcataacggctatactctgacttgagatgtgctgaataataaccagctatcgcgcgtccgccaatggcgacgaacgagggaagaaggcccgtgccacgagcaatcatcgaggtaagaaacctacgcaaggaataccccgtcgaggatgagacggtggtggcgcttgaccgtgtcaatctcagtatcccgcaaggccagatctgctgcattttcggcgaatccggctccggcaaatccacgctgctcaaccagttggccggcatggaaaaaccgacgcgcggcggcgtgagaatcggcggcgtacccgtcagcaaactcgacgagcgtgagctggcggccttccgccagaagcatctcggcttcgtattccagtcgtacaatctgctgtccaatctgaccgcgctcgaaaacgtggcaatgccgctgatgttccgcggcgtgcccaaggaacagcgcgaacgtgcggcgcgtggcgtactcaaacgagtcgggctcggccatcgtctcagccattacccgcgccagatgtcgggaggccaacagcagcgcgtcggcatcgcccgggcgtttgtgaccaagcccgaggtggtgttcgccgatgagccgaccggcaaccttgactctaaaaccaaaaccgaggtcatgacgatgatctgcgcattcgcccatgacttcaaccagaccatcgtgctggtcacacacgatccgcagatggcctcatacgccgaccgcatcgtcaccttgctcgatggccgcatcaccagcgatcggctcaacaccgacctttcccgcccaactgttccgtccacgccgtccgcccaaagaacccaaggagttgaccgatgaagcacctctcccaccgcaccatcgccatcatcgtcgcgttgctctccacgctgtcactggcacttgccgtcatctcccttccgcatcaggcgtacgcggtcgacggcacagacggcacaagcggcacgaacagtacgtctcagggaagcgacggcgattccgcgccgatcgccggcccggtgccgaacatcatcgtcaccaacttcacctatggcggcgattccgtggccgccggcgccgatttcaacctcgacttcaccttccagaacatgggtcaggtggcggtgacgaacatggtcatcaccgtggacggcggcgagagcttcgccatcgcgggaggcacgaacacgttctacgtcgacgcgctgtggggcggttacgccatgacgcaaagcgtgccgatgcaggcgctcgcctccgcgaaaagcggtgcccagcccgtgaccgtgaacttccgatacgagtatgtggacgccagcgcccgctcctcaagccagtccgatgtcaagatttccgtgccgatcagtcagcctgaccggttcgaaatcagtgatcccgtagtgcccgaccaggtgatcgccggtcaggaaaacacggtcacgatggaatatgtgaacaagggcaaaggcgatatcgccaacgtcgaggccacgatggagggcgaaggtttcgatgccacgatgaaaacccagtacgtgggcaatgtggcttccggcgccaccggcacgattggttacgcctttacgccgcacgcgtcaggcgagctgaagaccacgctcaaagtcacgtacgaggattccgacgggcagaccaaaaccaaggaattcccgctcgccatacccgtaaccgatatgcagccggtggatgattccgacatggccgatccgaacctggaccagagcgccaatcagggattgccggtgctggtgtatgtggtcatcgtcgtgatcgccgtggtcattatcgtggtgattgtgctgctcgtgcgtcgccggcgcaagcagaaggccaagaagaacgatattgatgaggactgggatgattggtccgaaggcaaggatgataagaccgataccggcgtgacggatggtgctgcggcagacaccgctcctatcacaccagtcaccccagcctcatcagtcgcaccagccggctcatcccacaaggcctgaaaggcccgaccatgcgattcggcgacatactgcggctttgcagacaaaacctatggcggcgtaaatcccgtacgattctgaccgtgctgggcgttatcgtcggctgctgctcgattgtgctcatggtctctttgggccagggcattaatgagcagaacgagaagatgctcaaatcgatgggcgatctgtccatcgtcaccgtgtacaccaacggttatgccggtccgatgggcggtggcggttcgtccgagatgggcgataccaagctcgacgacaaggccgtggaatccttccgcgcgatgagcggcgtatccggcgtgacgccgatgatgaacttcccttataacgtgacggccagagccggcgcgggcggccgttacatctacgattacgtgcagatcatgggcatcgacatgacccagttcgaccagatgggctacaagctcgtcggtggcgagaagccggtcaaaaaggatcaggtgcttgccggcgaatggttcgcctatggtttcatggacaccctgaagaacggcgaacaacgcaccagcacacgcggcggtcagtattcctcatgcacgtttgaccagaccacaggccagtgcgaggaagaccaggacgaggatccgttcttcgacccgctcgccacgcaaatcagtctgaccaccggcaccaattatcagggcgaccagtacaccatgaacatgtacggcggcggtggcggcacaggcggtgcgggtggcaacaccgcgggtcagtcggaaaacgtcacctttgatgtgcgggcttccggcattgtggcgggcgactataacaaaggctatgccacctccgacggtctggtcatggatttgcaggcgttgaaggaactggccgccaaagtcgatccagccgccgccaaaaaagccaccgcctataatcaggtgctggtcaaggccgccgacctcaagtccgtgcccgaagtcgaatcacagatcaaagcgttgggctacgagacctcctcctatgaagacatgcgtaagtcgttggaagaacagtcgcgcgcgattcagctgattctgggcggtatcggcgcggtttcgctgttggttgcggccatcggcatcgccaacacaatggttatgtccgtaaccgagcgcacgcgcgagatcggcattatgaaggcgcttggctgctacgttcgtgacattcgcgtcatgtttcttgcggaggccggcgcgatcggattcttcggcggattgatcggctgcgtgctgagcggactgatatcgctgggcatcaacgttgtcggcgcgttgtatgcgggcggcatgagcggcggcatgtctgtcggtatggtcagcggtgcaggcgggggctccggcgacggtaccggtggcggaacatctatctggaccatactctggcaggcgatagttggtggcgagaatgtgacccgttattcggtgattccgtggtggctgttcctgttcgccgtactgttttccacgctgatcggcttgctgttcggcttcggcccggccaataaagccgttaaaatcccggccctagacgccatcaaaaacaacgagtgatcgcctctgtcacctgctccaccgttagtccataacgttcgttcagttcgcccagcggcacgcggtcggtgaattccttggctgcgccgaagttcagcacatgaggattacggctgccgtccgagacatgatgattcgcataatatgcggtcactttctcgccccagccgccttcaagctgcccgtcttcaagggtgatgacctgctggtggccatcacgcaacgactccagtacgtctgaatccagcgacgtgcactggcgcgggtcgataaccgttgccgtgatgccataatcggcagacaatgcggcggccgtctgctccgccaacggatacgcattgcccagtccgataatcgcggcgtgcgagcccgtctgattgacccgccaatccagcatgtgacgcacaccggcatgctgagccgttacgctaacggtcccgcggactgttgcggcagatatgcccccgctggcggagctgacggagactggcagcgaagttgactgggggcggtcagcgatctgcccacccgtcaccggcagcagcgtcgcatcccgttccgccgtcagaatcgcctcgcccggcactcgaatcaccaccggaccagcaggggcgtccgcagaaccggccggcgcggtagcccatgccagatcagctagatagtcgcgagccgaagtcggcaccagcatcgtagcccctggaatattggagaacatcgtcacgtcatacgcgccggaatgcgtattgtccgaaccggacaggccgcccagaaaatcaagtaccgtgactcgcgaacggttcaggctcatctcctggaagaactggtcgtacgcgcgctggaagaaggacgccgtggtggccaccaccggcgtgccacccgcccgtgcgatgccggcagcgtacgccacggcatgcgattcggtgatgcccgtgtctacataatgtgcgcccgcgcgctctcggaactcatgggtgatgccgttcgagcccggcgtggcgggggagatgaccatgagtcccggctcggcggcgaaacgcggttcgagtgcggccatcgccattttgccgtaatgcttgcgcggatcgtccggcttgccgattgtggcatccggattctgccaatgcgaggcctcgcactggccctcatgcggttcatgatcggacaggttgcagtgatccgaatgccacggctcgctgtggttcacgttatcggtgggatgcacgccggtgggggagtcgaacgaaaccggtgaggccgaggcggtttgccgatctgcgtgagtctcctcaccgtcatatcccgcgcccttcagcgtatgaatatggaccaccaccggatgatcgatatcgcgcacttcctcgaaagctgcgaccagcgcggaaacatcgttgccggcctccacataccgataatccaagccaaacgcgttgaacagattcggctgggcggtgccgccggacgcgcgcaggcgggcgagcggaccgtacatgccaccgaaatcgccggcaatcgacatctcattgtcgttgaacacaatgatgagattgccgccctgctcggccgcgttgttcagtccttcaaacgccacgcccgaactcagcgaaccatcgccgatcacggcgatcacattgccgatgcctctgttcgggccttccatatcgcgggttttcgccaaaccgcaagccaatgaaatcgaggtaccggtgtgaccgagcacgaactggtcgtgtttgctttcgtccggattggtgaagccggtcacctcgctgaaacggtccgggtccagataggcggcggcgcggcccgtgagcatcttatgcacgtagctttggtgggatacatcgaacacgatgcggtcacgcggcgaatcgaatacgcggtgcagggccaccgtggcctccaccatgcccagattggagccgatatgaccgccgtgttggtggccatatgccagcagcgtggcgcgaatctcacggcagagttcggcgagctcgtcgggggcaagggccttgacatcggccgggctggcaatgcggctcagcagatgggagtcgtcgccgtgggaaggggtaatgctcgggggtatgtcatgaaggcgcgtggtcccctcggcagcgccggagacggcgaaggaatcgcttgaatcaaatccgtttcctgacgcgctgcgcataccctcgaatctcccttcgctagtctttccgaagttgaatgctaacgcccggcattgtccgaggtccacatgacgaagcaatgcccccaacatctccgtaaatgggtgattcgttcgctgcgcgatgtgggacaatgaatgcggtaattccttttgataccaaggagcgcgcaatgaaggccgtatacgcatccaccgtcaaccatgccgatccgcttgccgcgttggcggtgggcgagcagcccgagccccaggcccgcccgttctggtcgaccgtttcggtgcgcgcggtgaccgtaaaccatcacgacgtctggtcgctacagggtgtgggtctcgccgccgaacagacgccgatgatcctgggcaccgatgccgtgggcattctggacgaggacatccccggcaagcatgggctcaaggccggcagcgaagtggtgctgtacacgttcgtcggcaccgatggcgcgggcgtggccccgggcgagcgccgcacgatcctctccgagaaatatcccggcacgatggccgagaagacttccgtgccgtccgccaacgtgttcgccaagcccgcaaacctcaccacggctgaggcggccgcacttggcaccagctggctgaccgcctactcgctgttgttcgatgccgccggcatcaagccgggcgactccgtgctcattcagggcgcgggcggcggcgtgtccactgcggccatccagctcgcccatgccgccggtctggaggtgttcgtcacctcgcgcgacgcggacaagcgttccaaggcgctgaaacttggcgcgaacgccgcgctggagatcggtgcccgcctgccgcgcaaggtcgatgcggtgatcgaatccgtgggcgcggctacttggagccattcgatgaaatccgtgcgccccggcggcaccatcgccatctgcggcgccaccaccggcgaccagcctggtgcggagctcacgcgactgttcttccaggacatccgtgtgcagggctgcaccatgggttcgcgcgaggatttcgcacgattgctgcgcttcgtggagcacgccaatctgcatccggcgatcgactccgtggtcagcggtctggacgccgcgcccgaggccttcgccaagatgattgccggtgacgtgttcggcaagatcgttattgagctgtaagcctcacagaattatgtattgagaacgattcgctgcgtggcttaactccgctatcaggagtacagtgggccttattctcaataactagggagtaaatgataatggcaaatgaatccaagcccgaagtcgcggtggtcatgggatcctccagcgactgggagaccatgaagcgtgcctgcgatattctcgaccagttcggcgtcgcctaccacaagcaggtcatttccgcgcaccgcacgcccgagctcatggccgagttcgcgcacaacgcccgcgccaatggcctgaaggtcattatcgccggtgccggcggtgccgcccacctgccgggcatgatcgccgcgcagaccacgctgcccgtaatcggcgtgcccgtgcgctcccacgccctgtccggctgggattcgctgctgtccatcgtgcagatgcccggcggcatcccggtggccaccaccgccgtcggcaactccggtgccaccaacgccggcctgctcgccgtgcagatgctctccgccttcgagccggaactggccgacaagcttgaggattaccgtaacgaactgaaggaaaaggtggccgaatccaatgcccagcttgtctgaagaaacgggcggccgcgtctccatgctgatgccgggctcgaccatcggcatcatcggcggcggccagctcggccgcatgatggctctgtccgcccgctacatgggcttccgcgtcggcgtgcttgacccaacgccgaactgcccgaccggtcaggtggccgatttccagatcaccgccgaatacgatgacaaaaccgccatccatgatctggccgtgcagtctgacgtgctcacctacgagttcgagaacgtggacgccggcgccatcgacgaggtgcgcggcatcaccgccaccccgcagggcaccgacttgctgcgcgtgacccaacaccgcgtgcacgagaagcagttcatcaacgaccacggcaccgccaccgcaccgtggcgcgctgtcaacaacttcgatgagcttgacgccgccctcgacgagatccattatccggccgtgctgaagaccgtgtccggcggctacgacggccacggtcagctcgtgctgcgttccgacgccgacttggagaagatccgctcccgctccgaccgtggtggtggcttcccgccgagcatcctggaaggcttcgtcgacttcgcattcgaggcttcgatcctggtctccggcaacggcaaggacttcgtcaccttcccgattgtgcgtaacgagcaccgcaacaacatcctgcatatgaccatcgcccccgccgatgtgtccgaacatgtggctcgcgaagcgcatgaactggcgattcgcttggccaagggcttcgaactggctggcacgctggccatcgaactgttcatcaccaaggacgatcgggtcatcgtcaacgagctcgccccgcgcccgcacaactccggccactacaccatcgaggcctgctcgatggaccagttcgacgcccacatccgcggcatcgccggctggcccatgcccaagcccaagctgctctcgccggccgtgatggtcaacgtactcggccagcatgtggaaccgacgcgcgcgctgatcgccacccacccggagtggaatgtgcacgactacggcaaggccgaagtgcgccacgaccgcaagatgggccacatcaccgtgctcaccgacgacccggccaagacggtcgctgaccttgaggccaccggctgctgggacgacctgaaaaagaaggcgtgaccttaccgatggttgaacatatcgaacgccagaccaagcagaaggacgcgattcgcgccgccttggccgactgcgaggagttcatctccgctcaggacctgcaccgcaggctggaggacgaaggctcgaaaatcggcttggccaccgtataccgccagctcaacgccttggccgatgccggtgccgccgacacgatccgcctggacggccagcagctgttccgcctatgcggcgacgacggacatcaccaccacttggtgtgcaggcggtgcggcaaaaccgtggaaatcgacccgcccagcgaggcttggctgcgcaaagtggccgacggccacggcttcaccgttgaatcccacaccttggaggtcttcggactgtgctctgattgccaaaaggagcagaaagcgcagaaggctcagaaagcagtgagcgaataacaaatgggatcggcttcaaagccgatcccatttgttattccgctgctattccactgacttcagcgcgccgagcatgctgtttctttgaggtcgtgttctgcacgatgcctttcacgccgtccagcttcatgagcttggcgctgcgcgactccacattggaggtctcgtggttcttgagccgcaccatataggcgttcgattggtgctgctcgccgaacacgtgcttacagccacccgaagtcatgaacatgaaatgcccgaagtagggaagccggcttgtcacgcagctcgcgcttggccgccacccaggccggtatcacggcgctcgcccacgccaccagggtgatggcagggtggaacgccagcatgacacgccgatgtaaatgcaaatgataataattctcaatacatgttattctgtcgtgttggtggctgggcgatgatgcagcaacagcagcatcgcccagccgttcggctaattagagaggaaaacccaatcatgtccatcatgtccaacgccaagcgcgcgctcgccatcgcggccgccgcggcgaccctgttctcgatggctgcctgcggttccagcaacgccgccagcggcaagtccgattccagcggcgccgcgtcttccggcaagatcgaggtcgtcgcctccatcaaccagtggggttccgtggccgaagacctcggcggcagcaacgtcgaagtcaccaacatcatgaccaagaccaacgtcgaggcgcacgattacgagcccaccagccaggatgtcgccaagttcggcaccgccaaggtggccgtagtcaacggcgccgattacgacccgtgggccaccaaggccgcccagtcgaccaaggccacgctggtcaccgccgccgaaaccgccggcatcaaggaaggcgacaacccgcacgtctggttctccgccaaggtgcgttccaacaccgccgacgccatcaccgccgcctaccagaaggccgacccgagccacaaggacgactacgccaagctcaacaaagaatggcacgccaaggaagaccagcttgagtccaagatcaaggagacttccgccaagaccgagggcctgccgtacgccgccaccgaatccgtggcctggtacctggccgacgacctcaagatgaccgacgccactccgaagggctacgcccaggcctccgccaacgagagcgagccgaccccggccgacatcaaggacttccaggacaccctgaaggccggcttcatcaagatgttcgtcttcaacagccaggaagcaaactccactactgaccagatcaccggtgccgccaaggacgccaacgtgccgatcgtggagctcgccgagcagatgccgaagcagtacaccaacctgctcgactggatgagcgcactggtcgaccagttcgccgccgccgtgaagtaatgcggcagtagccgtcaatccgcaacagcgataaggggaataatcaagtcagatagcgaggcgttgtctaggggagaacagaacacttcgctatcagggataggctccttatatatcagggtgcttcggggatgtcccgaggcaccctttgcgttagggtgaatagttaggaaacggtaagaaaaatagtggaactatggattttccaaggttcagcggcaacaatatgcccttgaaaagtcacatacggaaacaggcgaatgagcgagaacactagtagtaccaccacagtgaaaccccatttcaagctttgggccaaaaaggtcgaagccaatgaagtcacgccccaacacccccacaagcccttccccggctgggtgtacggcgtgctcttcgttatcttcgacatcattgtcgtgacggcgctcgaagtgggcgtttcgtccagctccacccgtgtgcagctgtccagtccgaccgtcggattcggcttcgtgagcaagatgtggaccgacggcaatttcgtattcgtgctcaacgtgatacttgtcgcgttgctgtacctcatgttgctgatgctgttcaaccggttctggacggcaagcatcgtgattcttgcggtcggaatcatcgtggccgccatcgaacatttcaaggtcgagatccgttacgaggccattctgcccgccgatctaggcttccttggctcgaacaccggcaacatgctcaccttcattccggccggtgcgcatgtgaccatcctcgtggcactcggcgcgttcgccgtactgctcgcgctgattctggtgctgcgtcatttcgatgggcgcaaaggtcgcatgattcgtacggataacctgagcctgaacctcacctcccgtctgattcttctgctgctgccgattctggtgttcgcgttgtactgcattcatgtgagcaccaccgattcgctggccaacaagttctcccgcgccttgggagacacgccatccatgtgggattccgtgtatgacgcgcagcgcaatggtccgctcgtggccttcacccgccagctcaacccgaagatcatggacaagccgagcaactactccgaggagaccatgaagaaggtcgccgctcgctatcagaaggaagcggagacaatcaacgcctcccgcaccaacaacctcactgattcgacagtggtgtacgtgttgtccgaatccttctctgacccgagccgcgtgccgggactgaagaccaataaggattcgatgcccaacatccgcaagatcaaggcgggcaccacctccggcctgatgctctcctccggctacggcggaggtacggccaatctcgaatacatgggactttccggcctgagcatggccaatttcgagtcctccctgtccagcccgtaccagcagctggtcccgagccagcattggacccccaccatcaaccagctgtggggcgcgcccgtcaactcgctcggctaccacccgtacgaatccagcatgtactcgcgtgccacgaactacaagaagttcggcttctcgcacttctacacgttgaccggtccggacgtgatcaagtatcaggacaagatcgacgagtcgccgtacgtctctgataagtcttcctatgattctgcgttggaaggcatcaagtccggcaagacgaacaagttcattcagatcattaccatgcagaatcacatgccctaccacgagtggtatgagaataacgactacaccgccgaatccaccacgggtacgccgctgggtgatgatgaacagcagtcgattgagacctatcaaaagggtgtggagattaccgatcaggccactcaggagttcctgaatgaactggatgcgctggataagcccgtcaccgtggtgttctatggcgaccacttgccgggcatctactcgtccgccagcgaggataacaacaactccttggccctgcacctgaccgattacttcatctggtcgaataaggcttccagctcccaaggcaataaggcaagcaatgcagcctactcctcgccgaacttcttcgtggcacaggccgccgatcacatgaacgccaaggtcagcccgtatctggcgttcctgaccgaaatgcattccaagatcgccgctatggaaccgcctgtggtcaacaagatccaaggctgggatcgtatccccgaaggccagaacatctatcttgatcagaacggcaacccgatgtccaccgatgacttcgacaaggaaaccaagcagttgcttgccgactacaagctcatccaatacgacatcaccgccggcaaaaactacctcaaagacacggactttatgacgctgccgtaaagcagacagcctagtagtctgtctgtaggcaacgtgcgagccgacagacgagccagcaaggcgcagggcgtagcccgtccaaaattgcagtagcgctgccgtaaagcaaggggtgctttcatgacgaaccagactttcgaacaactgaagaagacttacgaatccggtcgtacccggccgctggcatggcgccgcgcgcagctgaacgcactacgccgtctggttacggagaaccgtgatgcctttgtctcctcggctatggctgacttgggcaagcctgcggctgaaaccgtgctcatggaactgaacctggtggctggtgaggcacagttcgtgcgcaatcgtctgggcctttggaccgcccggcaccccaaagcgatgcattggatgttgcagccggctgccggatggacgattgccgagcccaaaggcgtggtgttcatcatttcaccgtggaattatccggtgctgctggccttggaaccaatggctgatgcgctcgctgccggtaacgccgtctgcttgaaaccgtccgagctttcaccgaatacgtccaagctccttgctgagttggtgccgcaataccttgataccgaagcagtgcgcgtggtcgagggcgggcctaaggaaaccggtgatttgctgaagaatccgttcaaccatatcttctacaccggcggcgggcacgtcggcaaaatcgtcatgcgtgcggcggccgagaacctgacgccggtcacgttggaactcggcggcaaatcaccgtgcttcgtggaccgtacggcggatatcaatgtggccgcacgacgtatcgcatggggcaagttcaccaatgccggacagacctgcgtggcgcctgactatgtgcttgccacgccggatgtggctgaagcgttggtcaagcgtattgccgtggcggtcaccgagttctatggtgaagatccgaaggcctcgcctgattttggtcgtattatcaacgatcgtcattttgaacgactgtgcaagctattgccggtcggcaccgtgccgcctgaggagccgagctcgccgctggtgcaggtggcatcggcggtaggcgcggccatggatatggttgggcggcgcttcaatgccgtgactactgggcgcggtggcgcgggggagatggccggcagcgcgaacaatgcggcgaagccgacggccggttcgaatatggcagccgctgatgatggtgcgactgcctcggccgctgttgagccgagcgagattcacaaggtgcccggcgtgttcgacccggccggtcgaatcgtttgcggcggcaaggtcgatcgtgccgcccggtatatcgcgcctaccgtgctgtacggtacgtcgccagatgcgccagtaatgaaggaggagattttcgggccgattctgccgattctggtggtcgaggatgccgagtccgcaatccgattcatcaacaagcgatcccggccgttggctgcatatgtgttctcgcgcgatcacgaggttcggctgactttcgaacgtcagaccagctccggagctttgggatattcgttgccgttgggccacctgctgtccagccgactgccgttcggtggcgtggacgcgtccggcatcggcgcctaccacggcaaagcaggcttcctcaccttcagccacgtcaaaaccgtggttaccaagccgcagttccccgacactctgcgcctcgtgtacccgcccttcaatgaagccaaggccaaactgttcaacatcatcgccaaattcagctagcgtgatatcgctcgctgatattgggtgatggcgttgtcatagtgacgttcgctgtcccggtaattacgtcaatcgattgattcgtgtaccgggccagatttttctgtcctagtatttgatttcgggtcatttttgcttaccgggacaaaactgacgccggaagtatcgtccgcgtattacgaaaatggcggaatagtgcggtttcgtatggaagggaatttcaaatattcctatattcgaggggttcagctgtcctggtttgcgaaaaagagccgaaatcggctaccgggacagaaaaatctggcccggtagccacgtcaatcgattgacatgtctgccaggccaaaaatatgcagcagatgcgccgcttctgttacttcagggctttgaagccgatgtcgtggcggtaaaacagtccgcgcagctcgagcttgtcgatgattgcgtagaccttgtcctgggcggacttgatgtccggagcggaggtttcgacgagcagcacgcggccagagttggccacaaggttaccgtgctcgtcagaggcgacaccggcgtagtagacgtgcgaatcctcgtcgacttcgatttcgggcacacgggcacccttgatgacgttctccgggtagccgttggaggcgatgaccacgccgagggtggcgttggactcatcccaggtgaattcgggggtttcgccgtcgagaatggcggagatgccggcaccgaggtcggaggtgagcttcgggagcacgacttcggtttccgggtcgccgaagcgggcgttgaattcgatgaccttcgggccgtcggcggtggcgatcagaccggcgtacaggatgccggtgaatggcgtaccttcctcggccatgccttcgacggtggggcgcacgattttctcgatggcctcgtcgaccacggactgcggaatctgcggcaccgggctgtaggcacccatgccaccggtgttcggaccctcgtcgccatcgtgggcgcgcttgtgatcctgggagatgggcatcggccagaaatcggtgccgttgacaaagctcatcagggagaattcctggccgtccaggaagtcctcgataacgaccttggcaccggcggagccgaagcgatggtcgatgaagatgtcttcgagtgcgcgctgggcggtgtgctcgtccatggccacggtcacgcccttgcctgccgccagaccgtcggccttgatgacaatcggggcaccgtgctcgtgtacgtagtcctgcgccatctcgagatcgctgaaggtcttgtattgggcggtcgggatgttgtgtcggtccatgagctgcttggcgaagtccttggaaccttcaatctgggcggcggccttggacgggccgaacgccttgatgccggcggcggcgaaatcgtccacgatgccttcgatcagcgggacttccgggcctacgaacacccagtcataaccattgttcttcacgaattcgataagtgcggcgtgattcgactggctcagctgcgtggtgtggatgccgtccttgagcatgcccgggttgccgggagccacggtgacttcgtcgatgctcggtgccttgagcagcgtgtaggcaatggtgtgctcgcgcgcgccggagccgataaccaatactttctgacccatgttgttcctttcctgcggaaagcgagttacttcagtacgatttgcgtgccggtggtgtcggcggtgatggagccgagcacgtaggcgggctcgttgttgtcggcgagcagcttcagcgcctcgtccttgcgagcggggtcgatggccagcaccatgccgatacccatgttgaagatgttgtacatctccttatgatcgatgttgccggccttctccagcacgtcgaagatcgggagcacgggccaggtgccgagctcgatttcggcggccaagccgtccggaatcatgcgcgggatgttctcgatgaagccgccgccggtgatgtgggccacgcccttgactacgcccgccttgaacaggggagagagggccttgacgtagatcttggtgggggtgagcagcacgtcgccgagcttttcgccgcccagctcgtcgagttcggtgtccacggtgtagccggcctgctcgaacagggccttgcgcaccagggagaagccattggagtgtacgccggtggagggcaggccgatgagcacgtcgccttcagcgatggtggaaccgtccacgatggcggacttttcggcaacgccgaccgagaatccggcgagatcgtattcgtcttcgtcgtacatgcccggcatttcggcggtttcgccgccgaccagcgcggaaccggcctgtacacagccgtcggccacaccggccacgacctgctcaagcagtgccgggtcgttcttgccgcaggcgatgtagtcaaggaagaacaacggctcggcgccctgggcggcgatgtcgttgacgcacatggccacgcagtcgatgccgatggtgtcgtgcttgttggccagcttggcgaccatgagcttggtgcccacgccgtcggtgccggagatgaggaccggctccttgtagcccaaggaggccagatcgaacaggccgccgaagccgccgatgccgccgaccacgccggggcggttcgtgcgggccacgtgcgacttgatgcgcttgacgacttcgtacccggcttcgacgctcacgccggcgttctcatatgcttttggcatttggttggcctttctacttattttggctcccctctggaggggagctgtcggcaaagccgactgaggggaggcaagcgcctctggttcaaagaattgttattgagtggattggtggtgagctattcggcatccggctgcacggtgttgtactcgttgccgatgtacttgctcttgtacagcgcgaattcaggcagacgcacacggtcctcgggcgtgagggacttcaggaagtcggcctcgtagtcgtcgagcgcagtggggtagtcgccgttgaagtaggcgacgcacaggccaccgtatggggcatcggcgttcagtccgatggattcgaccagaccgtcgagcgaaaggtaggccaaggaatccgcgccgatgtattcacggatttcctccacgctcatcttggctgcgatgagttccttggtggtggagatatcgatgccatagaagcaggggtacttcagcggcggggagctgatgcgcatatgcacttcagcggcgccggcttccttgagcagctgcacgatgcgcttggacgtggtgccgcgcacgatggaatcatcgataacgataacgcgcttgcctttaaccacgctgcgcacagcagagagcttcatacgcacaccctgctcgcgcagttcttgcgtgggctgaatgaaggtgcgggccacatactggtttttgattagacccatttcgttgggcaggcctgctgcttccgcatagccggatgcggcggacaatgaggagttcggcacgccgataaccatatcggcctccaccggggattcgtcggcgagacgtgcgcccatgcgcttgcgggcggagtgcacgttgacgccatagatatcggaatccgggcgggcgaagtagatgtactccatcgagcagatggccagctgcgtgttgttggtgtactgcacgatcttgtagccgtgatcgttgaccaccacgatttcacccgggcgaatgttgcgcaccagctcggcgccgacgacatccagtgcgcaggtttcggaggcgagcacgtaggcgccgttcttcatcttgccgagggagagcgggcggaagccgttcgggtcgagtgcgccgatcatggcgtcttcggtcatcagcaggtaggcgaaaccgccatgcaccgtgttgagcgcttccttgagcttgtccataaaggtgcgctgcatcgaacggcgaatcaagtgcatcagcacttcggtgtcggagttcgaatggaagatggcgccttcgtcttcaagcttgcggcgcagtgacgggcagttcgtcaggttgccgttatggcacagagccacgtcgccgtcatggaagcggaagatgaacggctggatgttgtccgtggtgcccgagccggccgttgcgtaacgcacgtggccgatggcgcaattgcccttcagtcgttcgatttcgcgctcatcgccgaacacctgggtgagcaggccgagtccgcgatgaccgatgagatgaccgttatcgttggagacgatgccggcgccttcctgaccgcgatgctgcagcgcgtgcaggccgaaataggtaagtcgggcggcgtcagggtggccccacacgccgaagatgccacattcctcgtgaatgtcttcgagttcagccgacaagccaaagctcctttttcaaacaggggattaactatctatcaaccctaccaatcggcggctacatcgcgtgttgtggggtggtggtggagtcttcccgctgagggaggaacagacaattaagaaagatggtgttgtggacttccgtgtgaggaggaagtccacaacaccatcttatcgggacagggattgcttcggtctatccgtttagctgcgaagcagtatttcggagaggacggatcggatgcttgcgggcatatgcgaatcggaacagtcttccatatcggagctgctggcatgttccatggcgtcgaagctgagtagagcacgcgggccgtcatggtggatggccgcatatgcgcgttccttagtcaaataacgcatattggtatgcagcatattccccatggtacgcatgcatgccgctgctctgccgctgcgcgtgtggcgtgggtgaagagcgtgcttgggtgcgttgcgtgcgtcgacttcggcagcttcgaacaggcatgttgcatcgaacaaatgttcgactgtgttgatatgctggtcgggccagcggtggtaaggaggtgatggcgatgggcagcggaacggtatcgacgcaacgcgagcatacctatattgccattgatctcaagtccttctatgcctcggtggagtgcgtggcgcgcggactcgacccgttgaccacgcatctggtggtggccgatgaaacccgcaccgataagacaatatgtttggcggtctcaccctcgctgaagaactatggcattcccggtcgtgcgcggctattcgaggtaaaacagcgcctgaatggagtcaacatcgagcgcgcggtccatgctcccggcggccgattaatcggggagtcctgcgatgcgtgcgacctggaacgctcgccgggactcaaggcctcgatggtcatcgccaagccgcgcatggcgcactatctggaaatcagcgggcaaatatatggcatctacctcaaatacgccgcacccgagcacatccatgtctactcgattgacgaggtgttcatcgacgccacgccatatctgcgctcgctgggtatggggccgcatgcgatggcgcgaaccatcgtgcgcgaaatcctcaccaaaaccggcatcaccgccactgccggcatcggctccaacatgtatctggccaaagtcgccatggatatcgtcgccaagcacatgcccgccgacaaggacggcgtgcgcgtggccgaactgaatgaaatgtcatatcgtcggctgctttgggatcatcgtccgctcaccgatttttggcgggttgggcgcggctatgccaagaagctcgagcatgccggactgatgaccatgggcgatatcgcccgatgctcggtgggtcgtgcttcggattactacaacgaagacctgctgtatcgcatgttcggtgtcaatgccgaactgctcatcgaccatgcgtggggctgggagccgtgcgaaatcgcggatatccgatcctatgagccaggtgcgcacagcattagcagtgggcaggtgctcaccggccccgccgactatgccacggcccggctgatcaccaaggagatggccgatgcgctggccctcgatctggtcgataaaagcgtgctgacgaaccgactgacgctcgccgtcggctatgacatcggcagtcttgattcgtcaaagctcgattcgtgcgctgattatgcgatgaaacgtgccgctgagcgggcagcgaaaagctatcaagggccggtgaccatcgaccgatttgggcgcaaggtgcccaagagcgcggtcgggtcgattggtttgggtgatttcacctcgtcgtcggcacgtattcgtgaggccatgacgatgttgtacgagcgcattgtggattcacgcttgcttgtgaggcggctgaccgtcatcgccgatgatgtggccactccggaggagctggccgccggcaaacgctatgaacagctcgacttgttcggtgatgacggggcccaatcgtatggatccgattccaccagcgaaaaaaatggagagcatgatatccagcgtgcgctgctggatgtgaaacgtaaattcggccgcaacgccgtcatcaaagccatggacatggaagacggtgccaccggtcaggaccgcaaccgtcagatcggaggccatcgcgcatgaccctgcaagagacccgtgcgtacgacgacatcatcaacctgccacaccatcagtcgcgcaagcatccgcacatgtcccgccaccagcgggccgcgcagttcatgccgttcgcggccctgaccggctacaaccaagtcatcgagcaaacagcaaaaaacgccgaaaccgccatcgctcaggccgaagcccaaggcgataccgatttcggcgcttgacaatcgctctcgttggaggaagtctcagattcgtcagcctacgtgacgttcgaagcggtggaagccggtgatcttgtcgatttcggccatcgcgtcagccggaatcacaaagcccgcggccttcatgttgttctccagttggctgggcttggaggcgccggcgatcacacagctgatctccgggtgctgcaggatccatgccatggaaagcaccggcaggttcgtgccgagctcgtcggccaccttgcgcagctgctcgaccttgtcgaggttctcatcggtcagcagatcgttgatctggtggtcggactgccaggtggcgcgcgagccggccggcagcggctggcccttgcggtacttgccggtcagcagaccctgcgcgagcggggagaacgtggtgatgccgatgccgagcttgcggcaggtgcccatgatctcatgctcgatgtaacggtcgtttaggttatactgcggctgaaccacggtaatcgggtacaggttgtagcggtcgatgatgcgctgggcctcttcaaggcgagccgaaccccactcctcggaaacgccatagtacagcaccttgccttgggcgaccaggtcgctcatcgcgcgcaaggtctcggtaaggtcggtggtctcgtcaaaacggtggcagaagtacatgtccagataatcggtctgcatgttcttcagcgtctggtcgatgctctcgaaaatgtgcttgcgggacaggccgcggtcgttcacgccttcgccggtggggaagtagaccttgctggaaatgaccagttccttgcgcgggtactgcttcagcgtcttgccgaggaagcgttcggccgcgccgccagaataggcgtccgcgcagtcgaagaagttgacgccggaatcgtaggcgagtttcacggtctccttggccacgtcctcggccgccgtgcccttgagatccgtgacccagctgcccagtgcgacctcgctgatcttcagtcccgacttgccaacgctgcgatacttcatgtgtgctccttgataatcaatcgtcaccgtcgtctcttcatggccggccgtgaacgctaacaatttgattaaaacagttcaaccccacttgaacgcaagttggcggctattgcgacacgccggtggtgacctcgcgtgcgcaacgaatgaaatcatcaatgacgctccagcggtatggtgtggccgaaacgccgaatcggatggcgtattcggtctccggcccgcaatccagcacacgcaaggtgcgcagccgttcgccgtcaagcagcgctggcaggaaccgctccgggcataggcaggcacccatgccgtaatggcacagttccagcagagtcagtacgttatccgaacgggctgtgactttcggctcaaaaccggcacggcggaacagcaggtcggcaatgcggccatcgatgtcctgcggattgcccagcaaaaacgggcagtgtgccaacgaagatagatcgcctgaagcaatggcgcgttcatttggaatcgtgttggggatggcggaatcgttggcaatattagtctggctgttcgcggttccggtggtgactaaatccagccataatgattgcgcaatagccagtaccatacgttcgtcgtagaatctcctgttatcttgagtcatggctcgtgcgaatagcgttgatgtttgcgactgcgggtcatgagatggaatctgagatgaggctgtagccggaagaggagaggatcgcatgctggaagcgggcacgatgttgctgttctgtgcggtgctgtttgccagcgtcgccctcggctggtcgattattcccgcgctgttcgttggtgtgctgctgttcatggggtatgggctggttcgccggtgctcgttgcgcgcgatggcgagccgtgcggccggcagcgtacggtccgcggggaccgtggtggtggccttcgtgctcatcggcgtactgacctcgctgtggcgggccagcgggaccatcgccttcatcgtggcccattcgaccgcggtgattcacgccgccacggtgattccgctgtcgtttctactgtgctcggcgatgtcggtgctggtcgggtcgtcgttcgccagtgcggcgactatgggcaccatctgcatgtcgttgggattgtcgatgcaggcgaacccggtgatgctcggtggcgcgattcttgcgggcgtctatgtgggcgatcgttgttcgccggtttccaccagtgccttgctggtcaaacagcttacgcatacgaacctgttcaatactattgcccgcatgctgcgcacgggtgcggtgccgtttgtgctgagttgtgtggtatacgttgcggctgcggtggtggagtggctgtgcgcgagcggtggttccggatttggtgcggctagtgcggctgctacggctggctcggctggctcggctagagcggctgtttcaaccaacgcaagcagcataaccgatatcggcggattgttctcatcggccttcgatttgcattggcttaccctagttccagcattactggtcatcgtgttggcgttgctgcgtgtggacgttcggctgcttatgctcgccagcattgccgcctcggtcgcgatatgcgtgggcgtgcagcacatggaatgggcggaactgttgcggctgcttattttcggttaccatgcgcaaaatccgcaggtggccgcactcctggacggcggcggcatcctctccatgctcactgtgatggccactgtctgtatctcctccgcctacgccggcatttttgccgagacgcggatgcttgctcggctgcagcaggtcatcgagatgctcggccatcgcatcggcgcatgtggtgccaccatgattaccgcgacttgcgcggcggcgctcgcctgcaaccaaaccctcaccatcatgctcactcaccagttgtgcggtgggctgtacggcgacgacgaatccgaacgctccgcacaagctatcgatttggaagacagtgccgtggtgatcgctccgctgattccttggtcgatcgccggtgccgtgccgcttgccaccatcaacgcgcccacgctcagcctggccgccgcgaccttcctctacctgctgccgctctcgcggatgctcacctcggctgtacaccgccgctcgggatttcggactcggcatcgatcccaaaatcaaaacccgggactcaccatcccacaccggcccaaacccatgctccacatgttcgctcatggtttccatcctaagtcgggcgattgagcgcacgaggcaatcaggccgagaactgtttgccgaattccgagaagagctgacggcgggcgaagacgagcaggccgagcagcaccagcagggagaccagcccgctgaccatcaccagcacatcccacggagcccagccgagcggaatgaacgtcagaggcaacagaccagcgacgatgtcgaacgccagatacttggcgtactcgtcaatggccttggcccgcagcacgataagcagcaccacgtcaaagaccagcgaaaccagacacgtgatcggtatgacgaacatggtgacgacatgattcatcgtcgccacaaaccagaccagcgcaatcgccagcatgatatagaaatatcgaaacatgaggcgaagcggccgcggcacgtgcagaatcgcactattgatgaacagcacgctgatgatcagcgcggccgccgatgcactggcaatcggtatcggccacgaaaacagatagctgaagaagccatgcagcagcaaaatcgcgccggttacaaacgtgatgatttccaccgccaaacgcctcggacgcagatagatctgctgcgcggggaatgcggcgggggaggcctcgccgcgcaattcgttctggcagagcgggcaacgggccatatcgccggtgaaatcgacgttgcaggcatcgcaatgcttcatgccgacgctcctttctccacatgcacgccagcgatgttcatacggccgctgatgccctgcgcggcgagaatccgacacaggttcttgatgacgttcagatcatggtagatggtggagatgccgatgctcaggtcgtcgccgaacgagcagaccgtgaaattcaggctggccggtgtggtgaggaagctcaccgaacgtacatggcgcgcgagtcgttcgtccaaggtgactcggccaaggttcgagacggtggtcgtggtctcgcggtcggcgatgaaccgggccagctccagcacccagtccttggcaggggagggcgcgagacgcagcaccggattcttttccagcgcaatcatgcggttcatatgcgattcgacgcgctcgcgactggtggcatggccgagctgctcctgcacatggcgggcgatgtcggccaacggctcatcggtcagcaatccacccataccgttgccgtgcgcggtgcgggcggcggactgctggccgtcgccggctgcgtctgggcttgttgcggaagttttcgcggagtcctcatcggcttcgatttcggccggcgtgtacgccacgtaagtcatgccgtagaagttgcgcacggtctccgacctgaagaaggcgcgcaagtcgaccggaatatccacgcgaatcgcgcgattgcgggcgcgcgagggcatgacgtcgcgaatcgcgcacagtatcgcggcgatgaggtaggaggtgagactcactccgcactgatgcgctgcaccaagcaccttgctggcgctgacgtggtattccatgaacgtaggcgcggcccggtcgatggggccggccagccggtagattttcgtgcctggcgcagcgccggccttgtctttctcgtagtatttgtcgaagctgttttcggctttgtcactatccgaaccgtcgtaatccgaaggcacgcccggcacgtcgtaccgctcggcgatgtaggcgtgcagcagtgacttgaacaggttgatggcgccgcgaccgtccgaaatgatgtgcgagacctcgagattgacacgattgcggaaatagctcacgcggaacagcatgcttttgggtccgtaatgcagtcgcgagcatatcggcagatgttccggctccaccagcggccggccgtctgactgttcgaggtaatgccagaacatgccgttgagcaggtgcacgttgaagctcgggaactgagcgatggcatggtcgagcgcgtgctgcaggatgtccggatcgatgtcgtccgccagatcggccgaatagcggaacacggtctgcgaggagcggccagcctgggaggagtagaacttgccgatgttgtctagtcggtaccaagtacgtcttgccacgcgtcgcctccctccggtgcgttggcggtggtgccggtgccgggagctggttccagcggtgtgccgtcgaggaaatgctcgatgattcggtaggtggtggccaccagtcccacggccgacgtattgagcaggtagccgtggatgccatcgtgaattcggtaacaggagacgttgtcgttcaccaattgcaggcgacgggcgtacgcttcgtcctcgtctctgagcgggcagtattcggcggacaacaccagcgtgcgcggctgattgctcaggtcgtgcgcggtcagcggcgcgaaatacggattggtcaggtcggccacggacgaacggtacatgtcgatgtagtcggccatgtcctgtgcggtgaggatgtagtcggtgccgttggtccgcaccgattcgaacgggctggcctcgggattgtagtcgttgccgactaccgggtaaagcagcatctgcgtgcgcggcatgaactcgccgcggtcgcgggccatgagcgagacggcggccgcaagattgccgcccgcgctgtcgccaaacagcacgatgctgtcgggatccggtgctgggattgtcgcagatatatcgcccccgccggcgggggctgtcggcgaagccgactgggggtggtcaacggcggcaacagtaccgccacccaccccggaaatcggcaattccccagcaaacagctgccgggctacctcatagcaatcctcaacagcagtagggaagcggtattcaggagccagccggtactcgactgagatcacacggcgttgcagacgtacggccatatgcgcgcaagcctgcgtgtacaggttgatgccgcctgtggtccaaccgccaccgtggaaaaacaggatcgtgccacgcggcgtgattgagggaagttccgtgttggcattgccgggaataccgtcagcgttgccgctcgacgtgctttccttgatgagtattttgggcaggactttgggtaacacggcgggcagaatcgtggatattgccgaggccacgggcgtgccattggcggaagactcctccagggcttcgggcaggggcgctccataggcgaccagcggcgtgaacactcgcaatggtacggcatatccatccgccgtaggcgcgaaggcgtcctcgacacggcatttcggattggcgggtgcctgcttggcgataagctcttccgccacgcgctgcaatttgtacgacttgcccgcgttgggcttgatgtagctggcggccttcatcgcggcgaacaatgcctcgttgatcggcatgacgacaggtcctttcagcggcggattcggtagtgcgaacaccccaaccttagcccatgaccggcatgaacaaaaaagggaaggaacccgagagttccttccctgtgtgccgtatcagacgcgatacgcgccgattatcaggcggcgaagtattccacgccggcctcgaagatcggctggtacttgttgccgggcacgttgacgtacaggccgttgccggaacgctccgagtgacccatcttgccaaacacgcggccgtccgggctggtgatgccctcgatggcgagcagcgagccgttcgggttcacatccaggtccatgccgggggtgccggtctcgtccacgtactgcgtggcgatctggccgttggccctgagctgggcgagcacctcgtcggaggccacgaagcggccctcgccgtgggagatggccacggtgtgaatgtcgccgaccgaagtcttggacagccacggggagaggtcggaggccacgcgcgtgcggaccagtcggctctggtggcggccgatggtgttgaaggtcagcgtcgggcaggcgtcggtcatcggcacgatgtcgccgtacggcaccagacccagcttgacgagcgcctggaagccgttgcagatgccgagcatcagaccatcgcggttcttcagcaggtcacgcacggcctcggtgacggccggcgcacggaagaacgcggtgatgaacttggcggaaccgtccggctcgtcgccgccggagaagccgcctgggatcatcacgatctggctcttgttgatctcgtcgaccaacgcctgcgtggattcggcgacggcggccggcgtcaggttgttgacgatcagtgtggtcacatcggcgccggcacgctcgaaggcggcggcggaatcgtactcgcagttgttgcccgggaacaccgggatcaccacatgcggcttggccacggaagagccgacgtacacggtcttcttcggcgcgtggaagtcgatggtctcgacggtcgcgcccttgtcctcgcccttggaacggtacgggaacacggattcgatgccggactcccaagcttcctgcacagcgtccaggtccagcgtctcgccggcggccttgaacacgtactcggaggtggtggtgccgatttcgccgatctcgaccaaattggagacggacggaagcttggcatcgtccgccagctcgacgatgaacgaaccgtatgccggggtgaacaggtcgtccacggcgatgctgtcgttcagagtcacgccgatgcggttgccgagcgtcatcttgaacagggcttcggcggtggcgccatagcccggcgtagagacggccagggcatcgtggaagtcggtgagctcctcgatcacggagaacacctcaagcagcgcatccttgtccggggtcagaccgtcggccaggtagcgcggcgcgatgcgcacgatacggtgatcggagtccttgaactcgggggaggtggcacgcttcatgttgcccacggccacggcgaaggagatcagcgtcggcggcacgtcgagatcctcgaacgaaccggacatggagtccttgccgccgatggcgccggtgcccaggtccacttgggccatcagcgcgccgagcacggcggccgccggcttgccccagcgttccggctcgtcgcgcagcttctcgaagtactcctggaagctcaggtaggccttctcatgctcgaagccggccgcgaccagcttggccagcgactcgaccacggacaggtaggcgccggtgaactggttcttggacatgatgtacgggttgaagccccatgccatcgccgaagcggtggtggtctcgccgaacaccggcagcttggcgaccatggccatgttcggggtgagctgacgcttgccgccgaacggcatgagcacggtgcccgcgccgatggtggagtcgaagcgctccgaaaggcccttgttggaggccacgttgatgtcggtgaccagcttgttcatgcgctcggccagcgtgccctcgccccacggggtctcgtaggactgctgtgcctcgacatgcacggtctggtgcttggaagcgccgttggaggccaggaactcacgggacagattcacgatcttgtcgccgttccaggtcatcaccatgcgcgggtcctcggtcacggtggcgatcaccgtggcttcgaggttctcttcgcgggcgtaggccaggaactcgtccacgtcctcggcggccacgtccacggccatgcgctcctgggattcggagatggccagctcggtgccgtccaggccctcgtatttcttgggcacggtgttgaggtccacgaacaggccgtcggccaactcgccgaccgccacggacacgccacccgcgccgaagtcgttgcagcgcttgatcagacggcaggcatcgccgcggcggaacagacgctgcagcttgcgctccaccggagcgttacccttctgcacttcggcgccgtcgagttcgagcgattccacgttatgcgccttggacgaaccggtggcaccgccgatgccgtcacggccggtgcggccgcccagcaggatgattttgtcgccaggggccggggtttcgcggcgcacatggtcggccggggtggcggccacgaccgcacccacctccatgcgcttggccacgtagccggggtggtagatctcgtcgacctgaccggtggccagaccgatctggttgccgtaggagctgtagccggcggcggcggtggtcacgagcttgcgctgggggagcttgccttccagcgtctcggagaccggcacggtcgggtccgcggcgccggtgacgcgcatcgcctgatacacgtaggagcggccggacagaggatcgcggatgcagccgccgatgcaggtggccgcgccaccgaacggttcgatttcggtggggtggttgtgggtctcgttcttgaacaggaacagccagtcctcgtcgtggccgttcacgtcaaccttgaccttgacggtgcaggcgttgatttcctcggactcgtcaaggccggtcaggacaccgttcttcttgagccacttggcgccgatggtgcccatgtccatgaggcagacgggcttggcgtcacggccgagctcgtggcgcatcgccaggtaacgctcgaaggcggccttgacggtggcgtcatcgatggtcacttcgtccagctcggtgccgaacgtggtgtgacggcagtggtcggaccagtaggtgtcgatcaccttgatttcggtgatggtgggctcgcggctctcctcgctgaagtacttctggcagaattcgaggtcggccagatccatggccagaccgcgctcgtcgatgaacttctggccggcttcggcgtccatctcgttgaaaccggcgatggtctcgaccttgccgggcaccggcacctgggtcttcagggtttccttggtctccaggctggcctcgcgggcctcgaccgggttgatcacgtaatgcttgatggtgtccacgtcggcgtcggtcagttcgccttccagcgcgtacagcttggcggaacggaccgtcgggcgctcgccctgggagatgagctggatgcattcggcggcggagtcggcgcgctggtcgaactggccgggcaggaactcggtggcgaagaccttggcgccggcgaagtcgggcaggtcgtaggccacattgtccacctgaggctcgctgaacacggtgggtacggtctggtcgaacagctcctgggagatgccttcgacgtcatagcggttcacgatgcgcagggccttgaggccggtcagtccgaggatcgtgcgcagttcgcccgcaagctgctgggcttcgacatcaaagccgggcttcttttccacgtacacgcgaaaaaccatggaaatcctttcttgaaattaaagacaattggctcccctcgagaggggagccagataatgcattactcggcgacttcgatgccttcggacttggcgagttcggcgaggcgctcctcgatctcttcgtaggccgggatgatgctgccgagaccacggcggaacaggtccttgtcaaggtgctcgaccttgccggagtggtccttctggtcccacagacggcaggaatccggggtgatctcgtcggccaacagcagcgtgccgtcggtggcgcggcccatttcgatcttgaagtcgaccagcttgacgtcgatcttggcgaagatctcgatcagggcctcgttgatcttgcgggccagcggggcgatctcggcgagatcctcgcgagtgcatacgccgagggccaccaggtcatcgtcgttgacgaacggatcgtgcagatcatcgttcttcaggaagtactcaagcaccggctccttgagcggcaggccttcctccacgcccagacgggagcagaagtggccggcggccacgttgcgcagcacgatctccaacgggaacatgttcaccttgcgcaccagctggccggtgtcgtccactcgcttgataaggtggctgtcgatgccgcgcttcttgagcaggtcgaagatgatggtggtgatgaggttgttcaggcggcccttgccggtgaagtcttccttcttttcaccatcgccagcggtggcggtgttcttgtattcgacccacagaacctcgggatcgtcggttgcgtacagttgcttggccttgccctcgtagagcttttccagcttctccatgactcacctttcaggagtggaatttctgggtgaactaacggtaaaagggtaccaatcgagggctacaacaacactcagcatgacgctacgatgcggccagcgcatcatacgtcgctgcatcgaacggccatacgctgttgggatggcggaggcggccgtcattggccagtacgatcagctcgtctccggtcgtgtagccttccggcatgaaggtatctgcagaagcgcgtgtgaatactcagatgttcgtcaatagacgaaacatgactcttcggccatatgcacacgataatgggagtgacgaaatggtacaaggaggttcgtcatgatcgttcatccacgacccggacggcaataatattgaggccatgctgagctgatcaggccgtggactactccacggtaatcgtcaacgcatcggccacgaggccggccttggcacgggcgtcggcttcggactcgccgacggccagtgccacggccatgcggcggtggccatgcacttcgggcttggcaaaaatgcgcaggtccgtgccgggctcggccagagcagcggccacatcggtgaactcgacctcaccgtcgccggccaccacaatcgcatggcttgccgccaccgagccggccggaatcgtgagcgacacatgctcgggggtaatcggcaggccgagaatcgcgcgggcgtgcagcgcgaactcgctcagacgctgggaggccatcgtcaccataccggtatcgtgcggacggggggagacctcgttgaacagaatcgagccgtcggtgagcacgaacagttccacgccgaatacgccccaaccggtttcgccggccgcctgagccttggccaccaagccttcaacggcggtacgtgcgatgtcgcgcgcccgctcggcctcaccatcgggttcggtagccggctgccaggactcgcggtaatcgccggactcctgacgttggccgatcggcacgcacgtcacaatgccggcggacgaagaaacagtcagtaccgtcagctcacgctccagcggggcaagcgcctcaacgatcacgcgcgacacatcgccttcatcggcggcgcgacggccctcctgcgcttcggtccaagcggcatcgatggcgtcggcggaacgcaccaccgactggccgtgaccagacgagctcatcaccggcttgaccacgcacggatagccgacttccgaagctccggcgcgcagctcttccagcgagccggcaaaacgatacggtgtagtcggcaagcccaattcttcgtgggccagtacgcgcaggcgctcgcggtccatgcaaatcgtggcgatttcggcgctcggcaccacctgggcgcccgctgccgcaacaccggccagcacatcggtggcgatggcctctacctcgggcacgatgatgtccggcttgatttcatcgaacaatgcctgcaattcggcggcattcgccatatccaacgcgcgatattcatgcgccacctgctgggccggagcgccggcatacgagtcagcggcgcacacccacgcgcccagtcgcatgagctcgatggccacttccttgcccagctcaccagcgcccaaaaacagcacgcgggtggggtgcttgcccagcggtgtgcccagcgggcggttggctgcgcgagttgcgggggagacggcggaagtctcggcgggaattgcgggagaggaggtggaagtcacggcagtatctacggcgttctcagtcatacccacattctgccatgccgcgatgatttcgcctatgcggggctcggattcggcgacgtgcgctgcggagcgcgtgattcaatattgggcaaaatgcggcagcccataccatttcatacgcgttcaggcagcgcggccgacgccattgcagcgcggtggtttaggatgaggcaatgcgcgaaaacgggattgaagagagcattgatcgtccgctgactatcgctcttgtggtcgatacggtgggcaatcagggcaacggcacctccaattcggccttgcaatgggctgcagaattggagcggcaaggccatcatgtgaggcttgtcggtataggggcgcccgaatatccggcgcgcgtgaatagggtgccgctcgtctcgtgggtggccgccaagcagctcatgcaattcgccgaacccagcgacacgttgttccgcaccgcctttcaaggcgtggatgtggtgcatatctatatgccgttcaaattcggccgtcgtgccgctaaagtcgcccaccaaatgggcattcccgtgactgccggattccacctgcagccggagaacgtgctgtattcggccggccctctacgtcgcattcccggtatttccagcttcctgtactggctgttcaagcactggctgtacaagcacattgaccacatccatgtgcccaccgaaatgaccgcgagcctgttgcgcgcgcacgggtataaagccaagttgcacgtgatttccaatggttattcaccggtgtattcgccgaagaagccggccgatccggatgcctcggctcccgtgccgttccgcgtcatcgcttccggccgactggctagcgagaaagatcagattacgctgatcaaggcggtgtcgatgtcccggcacgccggcgatattcagctggtgatcgccggtactgggccgctcaagcagtatctcaagttccgcgccgggcgtttgctggcgcgcaaggccgatatcggattccacaagcacgccgatatgcccgatttgttgcgttcgggcgatttgttcgtgcattgttcgattgccgacatcgaatcggtgagcgtgatcgaggcgatggcgtgcggattggtgccggtgatcgccgcgtccgaactgtcggcggccagccagttcgcgctgatcgacgagtcgttgttccccgtgcgggacgcggccctgttggcccgacgcatcgattggtggattgcacatcaggccgagcgcgccgaatggggcgaaaaatacgccgaatacaccaaggcgcattattccgtggaagcctcggtccacaagttcgtggatatggaacgcaaggcgataggggagtaggagccttctcgtttgcggagaggtctttccctcagtccgcctgcggcggccagctccctcatcagagggagctacgaaaaaacctccctctgatgagggaggtggcatcgcgaagcgatgacggagggagagattagcgaagggttttacaacaactcaataagctgatcgacctcttcatgcgtggtggcccagctggtgcagatgcgcatcacggtatgcgtgtcgtcggccttctcggtaaagccgagcttgacctcgcgctccagacggtcgatagtcggctgatccatcgtcacgaaaatctggttggtgggcgcttcgaaagtgagcgtgtagcccttggcgcgcagggcctcgcgaatacgatcggccgcctcattggcgttgcgggcgatcttgaaatacaggttgtcagtgaacaaagcgtcaaactgcgcgcccagcacaaagcccttggccagcaaggcaccgtgctgcttgatgagggtcaagaagtgcttcggcgtgttgtgcttggtaaacaccacggcctcgccgaacagggcacccaccttggtaccgccgatgtagaacacgtcggcgatggtcgccagatccgcgagcgtcatgtctgaaccggtggcggtcagcgcgtagccgagtcgcgcgccatccacgaacagcggcatgtcgtacttgtgcgccacatcggcgatggcctgcaactcggccttggagtagatggtgccatattcggtgctttgcgagacgtacacggagcccgggaacaccatgtgctcgtagttgccgtccgcatagaaggtcttgcagaactcgtccagttcggtcgggtccattttgccgttgtgctggggaatcgtgagcaccttgtgcccggagaactcgatggcgccggcctcgtgcacgttcggatggccggaggcgaccgcgaccacgcctgcatacgccggggtgatggtgtcgatgacgacctggttggtctgcgtgccgccgacgaggaaccacacatccgcgtccggctggccgcaggcctcgcggatcttggccttggcctgatcgctcagttcgtcggacccgtagcccgaatacagatggttgttggcttcagccacggcttcaagcaccgcaggatgggcggcgcgggagtaatcgttctcaaaagacagcatgacggaccttttgtccttatgttcggtgaattggatatgccctgagtgtacaacgcggtggttcccggcatgcctatttggcctataacccaggagcggggaattcagggagaaaaaacaaaacccttccgcgaacggaagggttttactggggtggccaacgcggctcgaacgcgcgaccttctgaaccacaatcagatgctctaccaactgagctatggccaccatagtgccgtattcagcaagctgaattcgcgcaacaggtgaatactatacacaactttgcggatgtgtgctcatcggtgtgtcgcgatggaatcaagtggtcggtttcattcttggggccaggctgcgggctgtctcagatggcgggatgtggatgagtgggtcttgtgcggcgattgatgaaaagtcaaggcacacgacggtgtgatggtacgaccggggattgcagaaatgattacgtgagtgttcgcaatgtgagcattatgtttcatatcaaccgcgacccgcctagtttcatgcgatgttacctacaccaaacaagggaagagaaacaccatggaaaaggttaaagcctttgcagattggctgaccaagtggtttacggtcatcgtcatcgtctgggccgtcttcaactacttcgtgccggccgccagcttgtggggcaaggcgtacaccggctacatgctgggcatcgtgctgttcggcatgggcctgaccctgacgctggacgacttcaagcgcatcctgacccagccgctgatggtcatcgtcggcaccgtagctcatttcatcatcatgccgctcgtcgccgtggccctgtgcgcgatcttccacctgtccggcccgctggccgtgggcgtgattctcgtcggctgctgcccgtctggcacctcctccaacgtgatgagctacctgtcccgtggtgacgtggccctcgatgtctccatcggcatcctttccaccctgtgcgccccgttcatgattccgctgctgatgcagctgctcgcttctcagtacgtgtccgtgccgactcagtccctgttcctcaacgccgtcaaggtggtgctcttcccgatcgccctcggtgtgatctgccacatgatcttcggcaagaagatcgagaaggttacggtcgccctgcctatcgtttctcaggtggctattctgcttatcatcggcgtggtcgttgccgccaacggtccgaagctgttcgtggccagctccctggtggccatcccggtggtcatcctgcacaacctgtgcggctactcgctgggcttcggcttctccaagctgatgtacaagatctacccgaagggcttccgctacgcacagcagaaggccatcaccttcgaagtcggcatgcaggactccgctctgggcgcaaccctggccctgacctccttcgcaaccaacccactcgctgccgtgccgtccaccttcttctccgtgtggcacaacatctccggctctatcctgtccagctggtggcgcaaccacgatgacaagcacgagatccactgggattccgacaatggcgagaagggctctgccaagagcaccgtttcagcggcccacccgttcgacgccgataaggccgccaaggtcgctgcctgaaatcctgaaatggtgagaaaggtcgggtaaggcacgactccagtcagtcggtcatccacctttcctacctcgcataacatagccgctcccgcttactcccgattgaggtatcgggcgtttcgcgagggcggttttgctataattggtaatgcagaaagcggcaaggtaatacggcaaagaggccgggtcgctagaggttcccatcggatatggaagagcacgaggatgtgctggaaacagataacacagaagcggatgtggtgaaaagaagcataatgtaacctccttggcggtgcccccgtgtgacatagtctccgcgggggcacctgctgtgtggcgttccctttttgcgacgcattcccgggaatattgcgttgggagaatagttgggtgtgtgttttgcgacgcattggaatattgcgttgggaggagaggaaaagtacgggggcgcaggaggtccccaaaccagtgagttgtggctcggcgcgtcgttgtccggaggaatcgtagtatagatattcgtgtgtgccagcagcacgccttatgtaacaggcgagcatgctgggatatccttcaaaccgctgatcgcacgcagtaatgcgccgacgggaggggcgaaggccatcgggccggtggactgggctatcttttccgattcgtcgggtgccgccaacaggtggataccaagcgagtgtgctgaaaagtgtgggtgcagtgcggcggtcacacaaaagcaagagaaaccactgaatcggagaattcaagttgcctactattgaacagctcgtccgtaagggacgtcaggcaaagccgaagaagtccaagactttggccctgaagggcagcccgctgcgtcgcggcgtgtgcacccgtgtttacaccaccaccccgaagaagccgaactcggctctgcgtaaggtcgctcgtgtgcgcctgtcctcgggcatcgaagtcaccgcctatattccgggcgaaggccacaatctgcaggagcactccatcgtgctcgtgcgcggcggccgtgtgaaggatctcccgggtgtgcgttaccacatcgtgcgtggcgcgctcgatacccagggtgtcaaggaccgtaagcagggtcgttccctgtatggagcaaagaaggcgaagtaagagatatgtcacgtaagggaccttccaagaagcacgtcgtgctgcccgatccgatctacggttccaccgtggtggcgcagctcatcaacaagattctgcttgacggcaagaagtcgatcgccgaagacatcgtctactccgcgctcgatatggtcaaggagaagtccgaccaggagccggtggctgtgctcaagcgcgccctggacaacatccgtccgtcccttgaggttcgctcccgccgtgtcggtggcgccacctaccaggtgccggtcgaggtcaagccgaaccgcgccaacaccctgtcgctgcgctggctgaccgatttctcccgcgcccgtcgtgagaagaccatggctgagcgtctcgccaacgagatcctggatgcctccaacggcctcggtgcttctgtcaagcgccgcgaggatactcataagatggcagaggctaacaaggccttcgctcattaccgctggtaatcactcgccctgagtaaaactaaggaaaaagatggctgaagagatttcggacctccacgacgtccgcaatatcggcatcatggcccacattgatgccggcaagaccaccactaccgagcgtattctgttctacaccggtaagaactacaagatcggcgagacccacgacggcgcctccaccatggacttcatggcgcaggagcaggaacgtggtatcaccatccagtccgctgctaccacctgcttctggagccgtcagtcccacgacaccaaggacaagttccagatcaacatcatcgatacccctggccacgtggacttcacggccgaggtggagcgctccctgcgtgtgctcgatggtgccgttgccgtgttcgacggcaaggaaggcgtggagccgcagtccgagaccgtgtggcgtcaggctgacaagtacggcgttccgcgtatctgcttcatcaacaagatggacaagctgggcgcgaacttctactactccgtcgacaccatcaaggagaagctgggcgctactccgatcgtgatgcagctgccgattggttccgagaacgacttcactggcgttgtcgacctggttgagatgcaggcttacgtgtggaacggcaccgaggagctcggcgccaagtacgacaccactgagatcccggacgacctcaaggacaaggctcaggagtaccacgagaagctcgtggaagccgctgccgaagccgacgacgacctcatgaacaagttcttcgaggacggcgacctgtccaaggaagacatccgcgctggcgtgcgtaagctcaccatcgccaaggaagccttcccgatcttctgcggttccgccttcaaggacaagggcgttcagccgatgctggacggcgttgtcgattacctgccgtctcctgaagacgtgccggccatcaagggctacaagcctggcgatgagtccgtcgagatcgaccgtcacccggtcaagtccgatccgttcgcggctctggtcttcaagatctccacccacccgttctacggcaagctcgtgttcgtgcgcgtctactccggctccgttgtgccgggcgactccgtgctcgactccacccgcgagaagaaggaacgtatcggcaagatcttccagatgcacgccgataaggaaaacccgatggaccgcgctgacgccggtaacatctacaccttcgtgggcctgaagaacgtgaccaccggtgacaccctgtgcgccatcgacgatccgatcaccctcgactccatgaccttcccggatcctgtgatccaggtggccgtcgaaccgaagaccaaggccgaccaggagaagatgggcatcgccctgtccaagctggccgaagaggatccgaccttccaggtcacgaccgacgaagagtccggccagaccctgatctccggcatgggcgagctccagctcgacatcatcgtcgaccgtatgcgccgtgagttcaaggttgagtgcaaccagggcaagccgcaggtcgcctaccgcgagaccatccgcaaggccgtcatggaccagggctacacccacaagaagcagaccggtggttccggccagttcgcaaaggtcctgatgaacttcgagccgctcgacaccaccgagggcaagaccttcgagttcgagaacaaggtcaccggcggccacatctccgccgaattcatcggccccatcgaggccggtgtcaaggaggccatggagtccggtgttctcgccggcttcccggtcgtgggcgtcaaggccaccgtcactgacggccagatgcacccggtcgattcctccgaaatggccttcaagctcgcaggttccatgtgcttcaaggaagctgccccgaaggccaagccggtcattctcgaaccgatcatgaaggtcgaagtccgtacgccggaagagtacatgggcgaagtcatcggcgatctgaaccagcgccgtggcaacatccagtccatgaccgacggtgtcggcgtcaaggtcatcgacgccaaggtcccgctgtccgagatgttcggctacatcggcgacctgcgttccaagacccagggccgcgccatgttcaccatggagatggactcctacgacgaggtgccgaagagcgtctccgaggagatcatcaaggcccagcgcggcgagtgacacgcgccactgcatgaagtagccagtgtctccagtcagcggtaatatcgtataccgctgactgggttctggctcttcaaagtggcacataacccagaaacccagtagaataagcgagtccctgtgcgaaagggtgcaggaaactcacgagacgtccaggaggacaaaagtaatggcaaaggaaaagtacgagcgtactaagccgcacgttaacatcggtaccatcggccacgtcgaccacggtaagactaccctgactgccgccatctccaaggtgctgcacgaggagttcccggatgtcaacccggagtacgacttcaaccagatcgattccgctccggaagaggccgcccgcggtatcaccatcaacatcgcccacatcgagtaccagaccgagaagcgtcactacgctcacgtcgactgcccgggccacgccgacttcgtgaagaacatgatcaccggtgctgcccagatggatggcgctattctcgttgtggccgccaccgacggcccgatggcccagactcgcgagcacgtgctgctcgcccgtcaggttggcgttccgaagatcctcgtcgccctgaacaagtgcgacatggtcgacgatgaagagctcatcgagctcgtcgaagaagaggtccgcgacctcctcgacgagaacggcttcgaccgtgactgcccggtcatccacacctccgcttacggtgctctgcacgacgacgctccggaccacgagaagtgggtccagtccgttaaggacctcatggacgctgtcgacgactacatcccgaccccggttcacgacctggacaagccgttcctgatgccgatcgaggacgtcttcaccatctccggccgtggtaccgttgtcaccggtcgtgtcgagcgtggccagctggccgtcaacaccccggtcgagatcgttggtatccgtgcgacccagcagaccaccgtcacctccatcgagaccttccacaagaccatggacgcctgcgaggctggcgacaacaccggtctgctgctgcgtggtctcggccgtgacgatgtcgagcgtggccaggttgtggccaagccgggctccgttaccccgcacaccaagttcgagggcgaagtctacgtgctgaccaaggacgaaggcggccgtcactcgccgttcttctccaactaccgtccgcagttctacttccgcaccaccgacgtcaccggcgtcatcgagctgccggaaggcgtcgagatggttcagccgggcgaccacgctaccttcaccgttgagctgattcagcccatcgctatggaggaaggcctgaccttcgctgtgcgtgaaggtggccacaccgtcggctccggtcgtgtgaccaagatcctcgcctgattttcatcagacaagaatcttcgcttgaactagcgttatagaaaatccccttcgaggaaactcggaggggattttctataaccgcaacaggatatggatatgtaccacgacttccggcctggatgcgctagtgttgctttccaatagataaacggactgctgcactgcgaggatatgacactgatggcaggccgggaaagaaggtcgatgatgactggtgcacaggccgctcactgtggttccgtatccgcaatttcgctgggactgcccgtttccacggcgattcccgaagccaaaggcacactgccgaaagccttgttcgtaggcaaagcgccgatttccggcaaactcaagcagcgattggtgaacgagatcgaatccatcaccatgctggcgttggcccggtcggccaacacggggcttgcggacggcaaactgatcccggaagtgctggtcatcggactgaagcttacggccaaagccaccggcataccgaacgaagtcatcgacctgatcgccggacagcgcaaatcgggcatcgtgttcgtgtgcgtacgcgacgtgccgttcgagggcagcacgcgtgaggaatgcgcgttcgccgtgcgccgcgccataccggggcgtgccgggcacacgccgatctatcaggtatatgccggcgactggcagccggcgggggaggcccagctggagcaggccggctctactattgatgagatgtgggcatcgctgtgctcacagaccattttgggtacgccggaggtcgagaatctggatgcgcgcatcattcgccatactgaaattgctcggctcgaatccgaagtggacaagctcactcgtgaccatcagcgcgtcaagaacccggcccagcgcaacgaaatctatgccaaactccacaaggccaaggcgcggctcgcaaaactgcgcgaggcatagtggtgtgaaagccattgggcttccgctggcgggagctggctcgcgaagcgagactgagggtggtccaggtccgtggcctagggctacgcccaagctaattgaaatattcgtgcatcatacagcgtacagttaaaccatgttccctctgctcgaaaccctggtcgccgtatacgaggtgggtcagttcacgctggccgccgatgagctgaaggtatcgcagtcgacggtgtcgtcgcgtatcgcccaattggagcagatggtcggcgcgccgctgttcgtgcgcaatgcgaaaagtgacgtgacgcccacacaggccgggcggatgctgtaccagactgccatcggcatcgacggattatggcgggatacgcgtgagcagatcgcccgcgtgcaggaggcgcgtgagccgctggccgtgtcgttctcgcacacgaccgcggcgattctgctgccgaaggcgttgccggtgatggctcggaacatggacggtttcgacttcgctgtacacgtgatgaactcggatgcgattctcgaacaggccagcatgaaggccgtgcagctcggcgtggtggaaaagccgatcgtgaacgattcggtggaccgcgtcaccctgtgcgaggaccggctggtgttggcgggggagcctgacggcgtgtggatggtgcgcgaacacggttccggcgtgcggtattacacggatctgtatttcaagaccgctcaggttgtgcctgcacgcacgatggaagtgtccagtaatgcggcgattgtggcggcgctgtccgccgggttcgggcagtcgttgatttcggaagccgccgtgccggcgggcgtgccggtgcagcgggagcttggcgatgagtttgtgcggcggttctatgcgctggtgccgagatccggtctgacgcacgatcagcgggagttggcggagacgattattgctgcgctgcgcgggtagtcagatagtcgactgaggggaggttgcgaacgttgtttctctccctccgtccgcctgcggcggccacctctctcatcagagggagatcaattaggtatcgacaaaatcgatgatatgtattggttgcaatgatttgaccgatgtaaacgcttgagcttcaatagacatcatgagagagttctgtacaaaatggtggaagcgcattgccaccgttgacatgttgttcattggtgttctgactctgctggcctcgctgttcgcctcctggctcaagcagttccccggattcagcctgttcggcgcgcttatcatcgcgctgctcatcggtatgatcatccagttcccgatccgcagtgcctacgtcggttccaatgatggccgcaaggcaggcgtcaaggacgccgctggcctgatttccaacaagctgctgcgcctcggcatcatcctgctcggtttcaaactcaacctcgccgtgctgttcacgcagggcatcaagtgtctgccgatcgccgctgtggtcgttacgctgaccatcatcgtgtgctatgccatcgcccgcaagctcggtgtcgacccgatgctcgccatcctgaccgccggtggcaccggcatctgcggtgcggctgccgtcatgggcctggccggttccatcaaggtgcctgaggacaagcaggacgagaaggacaacgacgtgaccatggccgtggccatcgtcgccatcatgggcactgtgttcgcgctgatcgagattgcgattggcccgctgcttggcctgaccaagacccagctcggcgtcaccgccggtgcttccctgcacgaaatcgcccacgcggtcgccgccggcgacgctttcggcgcggtggacatcgccaccatcatgaagctttcccgcgtgctcatgctcgtgttcgcggccatcatcatcgccatctggtgggagaagaagcactccgaggtggagaacaccggcaagaagaccgtggccttcccgtggttcatgctcggcttcatcggcgcttcgatcatcggcaccttcgtgccgctcatcgcctccatcaccccgcagcttgtggactttgcgtacatcgtgctcggcatggccatggccgcgctcggcatcaacgtgaacttcaaggccatcgcttccaagggcaagaagccgatgctcgccagcttcctgacatcgattctgctcatgtgcttcgccgcaggtgtcgcgatgctgttcttctgataagcgctccaaatacaaataggcgaaggcgaacgacagtgagcaattggaatgtgtcacctaaaaatcacgtacttgcacaacggataaccccagccgaactggcaggccatcgcaatgaacttcaccacatatggactcagcccggtcgcacccggcatccagccgatcagcagcgtgctgaacgtgaagttccagatccacagcagcacgaacagcgccacggaacgggtgaagttgctggacgatttgaatgtcacgttgcggttcatcacgaagttgtaggtcgccgaacacaccacggcgatgccgttggcgatctgtgagggtacgccgatcaagtgcagaatggcgaacgtcgcatactccacaatggtctgcgtggcggaaacacccacatacttgcccaacacggcgagtccattttgcttcggggttgccgtgcccacggtattttccgcagtattcgttgtggtcgaggtatttgtggcgcccacaccttgattcggcttcacatccgctccattgttcgccatgcccatatacctcccggatgtacctgtgacgttcgacctcgcaatgataccgctgaccgcgtcgggaatcggcgtggcggtcagacgagaaaaccgcaggccgcagcaacgaccggcacacccagcgacagcaccagataggccgctgcggtggggtagcggtgtttgcggaagagcgtcaccatttcgttgattgcggtcgagaacgtggagaagccgccgaggaaaccggtggccagcactagccgccatggttcatcaagtgtcccgccgagtgccagcgccgcgaccaaaccggctaggaatccggcgatgagattgatggtgaacgtggaaagtgggaatgcgcgctgccagtacgttttgatggtcacgtcaagcagatagcggcaggaggcgcctacgccgccgcacaggcagaccaagattggtaggaatacggtcatcacgccttacctcccttgctggtcgtagcggcattcgtatcagcggacgcttcggcggatacgttcgaggagccggccagatgcgttcctgcccacacgccggcagacgcacaaaccagacccagcgcgaacgtcaccagtagataggcaatgccggccgccacctgaccgtcgcggattgcggtaaaaccttccagcgcgagtgtcgacatcgtagacaaaccaccgcatacgcccatgccgagtccgcgactggcaagttctttggaacgtgcgccgaaccgggaagcgccggccaagtaagcggtcaaccctgcatagcagaagcaagccagcatgttggccacaaacgtgccggtatggaagctgccagccgcgggaatctgtgcgaacgcatagcggatagcggtgccgatcgcaccgccgcagaagacgaccaacacaatatcaagatgaatatcggggagcttgcgcgccgggggagtggtcgtgtgcgtaatcggccgggcacctgcggatggggattgcgaatccataatagcctttcctgaaaccgctgaatcctgctgaagacacaacgattccatgcaatatcaaatcgtgtgtaggaactatcagcagtgtgcggttcgaaacgagttcaggcgggttccatcgccggttccttagcctactcgtggcggcgacaacaaacggcagcagtatctcggatattggcctatcgcggtggatttcggcaagagacttctgcaatgccgatgaacttggttgccgtgaggcgataaagcacgtagatgaattgcttggttgcttccatacctcgtgggtatggctcaacatggtttatggctattggttaatacatgtcgattgtcgtttaatggaacatgaggataacgggccctaatcgctcggtgccggaaacaaggagttgtgaatatgtctgaaaccatgaaagccgcgattttcgttgagcctggcaagatgaccgtggaagaagtgccaaaggcggcacttcagcaggatgatgacatcgtaattcgcatggtgcgcacctgtgtatgcggctctgatttgtggttcttccgtgggctgagcggacaggccgcgcacagtcaggtgggccacgaagccattggcgtggtcgaagaggttggcgcggcggtcgaatccgttaagccaggtgatttcgtggtcgtgccattcccgtacagctgcggcaagtgcccggtatgcaaggccggcttcgaatccgtgtgcccgcacggcggctacttctccgcttgtcaggccgaatacctgcgtgtgcccgaggcggacggcaccgtggtcaaggtgcccggttcaccggaagattattccgatgaacagctcgcatcgctgctgaccatttctgatgtgatgtccaccggttatcacgcggcggtttctgccgaggtcaagcccggcgatacagccgtggtcatgggcgatggtgcagtcggcctgtgcggtgtgattgccgccaagatgcatggtgccacgcgcattatctccatgagccgtcacgaggatcgcgcggcgctcgcccgcgaattcggtgcgactgatatcgtgcccgagcgtggccaagaggctattgacaaggtgctggagatgaccggtggctatggtgcggacgcggtgctcgaatgcgtgggctccaagcagtccttcgacacggcgattggcctgattcgccgcggtggcgtgattggtcgtgtgggcctgccgcacgacgtggagatcagcgccgaaggcacgttctacggcaacgtcggcatcaagggcggcccggctcccgtgcgccactacgatattgacggtggtctgctggatgcggtgctcaagggcgagattaaccctggccgcgtgttcaccgccgaatatgacctcgaccatattcaggacgcttatgaggccatggaccagcgcaaagttattaaggcgttgatccggttctaatcgcgtggtgtgacggggtttaccgcagtggtatttaacgtccgtatgtatgcggcccctttgtagggccgcatacatacggacgttgtgatgtgtctgacgcggtttacgctgaacgattgtggtgacgcaaaccggtcacctgttactcggcgagcagtgccttgtactgtgcagcggactgggcgagggcctcgtcggtgatgccgaaagcgccgcacgtggcgaacggcttgagtcaggtcgcgccgatgtataagccgtgccctcgatcggaataagcagctgctcgatggggtagtggccggggtgccggtctggtaggccgattccggcgaaccggtggacactgcgcatcgcgtcgggaaccgtggccaaggcgtacaccgaactcgccgactgcggcatcatcgacaccggtgccggctgcgcggcgcgtgtaaaacgggtcaagccgattcccgaaccgctggtgcgcgcggccaagacctatgccgacgaggcccgccggcttggcgcgagcctcgatgacgccttcaacgccctgtgcgcgcagtggtaaagcgcgcaccgatgcgaagcctacacggggtgcaccgtcagcgaaaagtcgccgatggtgctgacggtcgagggtgaggccagattgcagacatctcgcaagcagtacgtggcatacagcggaagataggttgttccgccgtcctgcgcaatattggagcgggacagcaccacgccctgcgagatgcgatattcggcattggccaatacggcgtcgatggcggcgtgcgtgcggtagctgcgccccgacttgacctcgaacggcatcacagaatcggcgttcgtgtcagcgatgaaatcgacttcaccatgtttctttgccatgtagtaatacagcggaatgtcttgcgccgtcagctcctgagcaatcacgttctcgtagatggcacccagattcggtgaggaatcatcaaggtatgcggcttgcgcggtcggttgcgggtatcgtgccatgagcataccggtatcagactggtacagtttgaacttcggtgattgcgccgtgcgtttcaatggcgatttcggctcggtgacgcagttggttttcaatgccacacccgcatcgacaagccaaagaaaatccttctgattgcggtcgtaccgagcaccggggctgatggaggagacggcgaatctgccgttaccgtcaatcagctgagtggggagctggtcgaagatctcctgcacctgcaatgcgcgattgcctgcgtactgcgaaatatcgtggcgatattgccggttcaactcgttctgtaccgcgcgcacagccgccaaatcacccttggtgtccagaaaacgttgcacgacttccggcatgccgccgactaccagataggtgcggaagttcgtcatcattgcatcgtgaatgtaccggtcgattggcgtgaccgaccggcaggattctcggatgttttcaagtgtcgacttctgtacgccgatggcccaacagaattcctcaaaatccatgggacgcatggttttttcgatgaccgagccaacggggtaggagcgtacgcccttgaactcagtgccgagcatggaaccggagaacacataatcgaaacggccatcggccaccagaaacttgaccatggtcatcacatccggtgcctcttgcacctcgtcgatgaaaatcaacgtatcaccgggaatgagcgttgaaggtgagaacaaggtaaggcggctgatgaactcctgcacgtcgttcgccgatgcgagcgctcgggccgcctgcttgttctcgtacaggttgatttcaaggtaatgggcgtattcgtgcttggcgaactcgcgtaccgcgtagctcttgccgatctggcgagcgccggtcagcagcagtgctttgccggtaccgctccgcttccattccagcagatcgtccgagattttgcgctcaagcatggcagctcctttccgaatcccttatgagagtagcattttctgccttgtatgtgcaaaatgccgcatttcaaaatggggctttggtgcaaaatgccgcattttaaagtagggttttggtgcaaaatgccgtgtaaatggtgaattggacgtgcttgtaaggggagctggatgatcgtgcggctggatgaccttgtaactaaatgattgaacgattgcgcggccgtcgtttgcgtggccgcaaagttgtgtgggctgttcgcgaattatgcgcggtcggccgtcatgtgcctgcgcttggggtgctcgataagtagcgctcgcttcttggcgtcctcggcggtcgaagccggtacgccgtcggaggaggcgtcgatgatgcgctgcaggtagccgtatagggtgtgcagctcgtcgtcattcagacagtccagcatagaggggcctgatcaaaaccggttcacgaggtcctttttgctttaatccccgctgagagcgcgtagcgccggaggatgatcggatgccgcgacgccgaatcaagattcagccgctcgccgaccagcccgaccagcaaggaaccggattcgcgcatcggcggcatgcgcgctgctattcgcgctgaaacagcatggcatgggtgcgctgacaccgcgccggcgcaaaggccatcagtgaaactggggaatcggattgcaggtggcggacggtgcccaagacgaaagattctcgtccggcgttcagccgccgtcgttggccgtgatgatactggagaccatgaagctcaggcggcggcagccaagggcgaagtcgagaaagaggtgacggcgtgacacttgaacagaggtcagatagcgcggcggcaggccacgaggcatgtgaccagccgatcaggagcctggaaatcctcaaccaatgcgttccgctgttcgagacgctgaaggatccgaaccggcagcagttgctggtgcaattggtgtgccatgggccgcagacggtgggggagctggccgaatcgtcggcactgtcccgcacggccgtgtcccatcacatcaaactgctggaacaagccggattcatcgaaatcagcaaagacgccacccgccgcatttgctcggtgcgtgcggatcgatggctgccgctgctcgatgaactgtcttccgccctgaaagccgaccttgcggcggcggagcagtgccgagcatgagcgacgatcaacggccgcaggcgattgaggtgcgcggtgcgcgcgtgcataacctcaagaacatcgacatcgacattccgctgggcgaactggtgggcgtggccggcgtctccggttcgggcaaaagctctctggcgctcggcgtgctgtatgcggaaggttcgcggcgctacttggaagcgctgtccacgtacacgcgccgtcgactgactcaagccagccgcgcccaggtggacgaagtgctgcatgtgccggccgcgctggccctgcaccagcggcccactgtgcccggcatccgttcgacgttcggcacgatgaccgaattgctcaacagcctgcgactcctgttttcccgcgtcgcctcgcacgtgtgcccgcattgcggggcgcgcaacgaaccgacgctgaacgtggcggccggcctgcccattacttgcgtcagctgtggcaaggaattccatgcgcccggtgctgaatcgctcgccttcaactcggccggcgcctgcccgacctgctccggcaccggcatcgtgcgcgaagtaaaccgcgcggccctggttccggacgagtcgaaaagcatcgacgacggcgcggtgctgccgtggggctcgctcatgtgggacctcatgaagcaggtgtgcggcgcgatgggcgtgcgtaccaacgtgccgttcagcgagctcacgcccgaggagcgcgacatcgtattcaacgggccagccgtcaaaaagcacatcctttacaagccgaagaaaggcaacgatttcgccgaactcgacttcacctacttcaatgccgtgtacacggtggagaatgcgctcgccaaggccaaggacgagaagggcctgaagcgtgtggcccggttcctcaaagaggggccgtgcgccgattgcgacggcacccgattgagcgccgtcgcccgggctccgcatgtgcgcgggctgaacttggccgaagccggcgcgatgaccttggacgcggcggcggattgggtgcgcggagtgccggaatccctgcccgccgacatgcggccgatggccgccaacatctgcgaatcgttcctggatgtggcccgacggctgctcgatctgggcctcggctatctggcgcttgaccgcgccggcgccacgctttcgaccggcgaacgccagcgtgtgcagctcgcccgggccgtgcgcaaccgcaccactggcgtgctgtatgtgctcgacgagccatccatcggccttcatccctcgaacgtggacgggctgctcggcgtgatgcacgacttggtggcggacggcaattccgtggtggtcgtggaccatgatgtgcgtgtactcaaagcgtgtgaccatcttattgaaatggggccggttgccggtgccgaaggcgggcatgtgatcgcgcaaggcacggtcggcgaggtggcggcgaaccccagtagtcgcattgcgccgttcctatccgaccaggtgagtgcgcgtatacgtgagcgtgtggccgaatcgcaagtgttcagccttggccgcatccgcatgacaaccagtcagctgcatacagtcaagccgttggacgttgatatcccgcgcggccggctcgtggcggtgaccggagtctccggctccggcaaaaccacgatggtactcgaatcgctgattcccgcactcaaagcgcaggcggcgggggagctgttgccggaacacgtgcgcgagcttgagaccgagggcatccgtcgtgcgaatctcatcgatgccacgccgatcggcgcgaacgtgcgctccaccgtggccacttatgccgatattcacgacgaattgcgccgcgccttcgcccgcacggacgacgccaaggcgggcggctggaaggctggcgatttctcgtacaacaccggccgactgcgttgccctacgtgcgacggcaccggttcgatctcgctcgacgtgcagttcctgccggacgttaccatcgaatgcccggattgcggcggatcccggtatgcgcccgaagccggcgcgattcggcgtgccgttaagggagaatctcacctttcgttgagtctgccgcagctgatggcgatgagcgtggaccaggcgctgtccgtgaccggcgacctcaagaaggtccacacgcgcctgaccaccttgcgtgatttgggcctcggctacctgacgcttggcgagccgacaccggcgctttcgggcggcgaagcccagcggctgaaactcgccagcgaaatgggcagggcgcagtcggacgcggtattcgtgttcgatgagccgaccatcggtctgcacccgcttgatgtgcgcgtgctgctgggcgtgttcgaccggctcgtggcgagtggcgcgactgtcgtggtcatcgagcatgacctcgacgtgattgccagtgcggattggattatcgatatggggccgggtggcggagaaagtggcggacacatcgttgccaccggaacgccggaacaagtcgcggccaatccgaacagcatcaccgggcggtatctgcgctgacttgtatggcggtcacgcgcctttgcataggaccctgcgcgagtaggatagccgtccatggtgcagattcatggcattagacgcgcaagcgcggacgcgaaatatcggcagatgaccgggcagccggtcaagccgctgatcctcaaactgtgcttgccggccgtcatctccaacttggtgaccaccgcatacaacctcacggacacgttctttattggccagctcggcaccgcgcagtccggtgctatcggcatcgcgttctccatcatgaccgtgatgcaggcgctcggcttcttcttcggcaacggcgcgggcaactcgatgagccgcgaactcggcaaacagaacaatgatcgcgcctcccgactactggccgtgggcttcgcgggcgcggtgctctctggtttggtgattgccacaatcggattgctgaccctgcggccgctggtcgtcatgctgggctcgacctcgacgatcgccccatacgccgtgcaatatctgacgccgttgctggtcgccgcaccctgcgtgtgcggttcgttcgcactcaacggattgttgagataccaaggtcaatcggcgttcggcatgattggtctggtgtccggcgcgctgttgaatttcctgcttgcgccattgttcattttcgtggccggtctgggtattttcggtgccggcctcgccaccgccatctgccagacggtgagcttcatgattctgaccacgatgagccgcaaattcggcgtgatgaaactgtccctgcgcaattgcaaaccggatatgctgctcatgcgcgaagtggctggcggcggcctgccttcgctgatccgccaaggcgccggctcgatttccgtgacttgcgtgaacattgccgccaatccattcggcgacgcggccatcgccggcatggccatcgtgatgcgcatcatgttgggcgccaattcggtgatcgtgggtctcggccaaggctttcagccggtatgtggttacaactacggtgccggcctgttcgcgcgagtcaaagagggatattggttctgcgtgcggctcgccacctgcgtgctcgtggcgttggcagcgctgctgtggattttcgcgccgcaactggttgagatcttccgttccgacccggccgtggtggcggtgggcgtggccgcgctgcatattcaatgctgcacggtgattctcaatggcttcaacatgatgggcaatatgatgacccagaccatgggccgcaccggcatcgcctcgtttctggccttgtgccggcaaggcctgttcctggcaccgattgtgctgattctgccgatgatatttggcgtgcttggtgtggagatggcgcaatcggtgtccgacgtgctgacattcgtggtcaccatcccgttcatgcggcgaatcctgcacgaattgcggtgaatgggtcgccgattggagggaaaagggatggggaacacagaagcagaggatagatgtcggttcggttgcatcctgcgtggtgagttgttgtccggatggttgcctatatgaaccagtgacaggaaatcaggggaacgcgagcgagaggagtgtgcatggggcagttcggcgtcatgattggccagttggtcggatttctgatcatgctgatggttgggtatggatgtgtgaggcttcgattctacggtcagacggcgttggacggcatgtgctcgttgctgctcaacgtgctcatccccgtgctcgtgttctcgaacgccgtcgacggcgcggaccgcgcgcagctcgccgccaactggggcgtgatgctgctgaccgccgtgatgtacgcgctgctcatcctggtgttctggctggtcgccaaactgttgcggctcaaaggttcgcgtagccatgtatttcaggcgtcgcttattttcggcaacgccggattcatcggcattccgttgattatggcactttggccgcagaacggcgcgatttacgtggcgctgatgtcgattatcgaccagacgctgctctggacgtacggcgtatggctgtgcgagccggtcgccgaaatgactggcggcaacgcgattggcgcgcgaggtgcggtcgcgaacggttcggtgaacggcgccggttcggtgggcaatgctggttcggcgagcaatgccgcaaacggtggttctccggtggccgtccgcccctcgctaggcacccgcgtcctcggcctgcttaaacgattcgtcaatcccgccttcatcggcgtgatgctcgccctgattctgattctgctcggcgtcaaggtgccggacatcatcctgaagccgctgcacaccatcggcaatatggccacgccgatgtcgctaatctacttgggcggcctgttcgcactgatcaagtggtggggcgtcctcaagcgctacgaactctatgttggcctagtcgccaagatgatcgcattcccgctcgccttctacgcgctactgactgcgctgaccggcgcattgccgcaactgccgatcgcccatgacatggtgctgatgattacggtcatcgccggactgccgaccatgaccaccattgccatgttcaccggtcgcaagaacaacatgcccgagtatgcggtcggcttcgtgctcgtaagcacgctgttctcgctggcctccctgaccatcgtctcggcggtcgtgttctgaattgtccccttcgacgaaaagaattccggggccttcagcgcttggaacctcattcataaataaatgctggctattctttttaccacgaatcaggaaccattttctgttgttctggccgaaagataattaagcgcaaatggcctttatcacatactgtttgcggcctcatcgacacagcgcagcgcgttgagcgtgcgtgggtagccgatgtacggcatgcactgcgatgccacagtgatgaggaagtgtcgatcgttgccgatgcgcatattggcgtgggcatgactggtcagttgcggctcgcacccaccctgggcggcaaggaagaggtggactgcgagggcagcggcagctttactcccctgcgcgcgcagtacttcgttcagtgcgacgatgaacggatagatgcgggcgatgcccagatatgccatggcctgatacgtcgcttccttgatttccgccggtgtgagtccagcgatcatcgcggccggcacgatgccgcggaactcggtgagactctggctgccgagcaaggtggccagaaacgacggcttttaacacgacctcgtaaggagcgttgggagactaagtagcggcccgcagctggaatattccagaagcaacacacatcgcataacacacaacacaacacacaaaaaagaacctcgtgaaacgaatttcacgaggttctttctagttacgctgaatgactcccattagactcccacaagagaagagcaatggcggaattccaacgttgctaagctctcaaactcagatgtggaagtagagctcgtactcgagcggggtcggagacaggcgagcctggtcgatctcgtcgcgcttgaggccaatccaggtctcgatcaggtcgtcggtgaacacgtcgccggcggtgaggaagtcgtggtcctcttccagggcgtccatagcctcagccagggagctcggcacctgcttgatgccagcgtgctcttccggcggcagctcgtagaggtccttgtcgaccggctccggaggctcgatgtggttcaggatgccgtccaagccagccatcagctgagcggagaaggccaggaacgggttgcaggacggatccggagcgcggaactcgatgcgcttggcagccggggaggtgccggccagcggaatacggatggcggcagaacggttacgagcggagtacaccaggttgaccggagcctcgaagcccggaaccagacggtggtaggagttcagggacgggttggtgaaggccagcacggaggaggagtgcttgatcagaccgccgatgtaccagcgagccagatcggacaggccagcgtagcccttctcgtcgtagaacagcggcttgccgtccttccacagggactggtggcagtgcataccagtgccgttgtcgccagcgatcggcttcggcatgaaggtcgcagccttgccggccagagcggcggtctcgtggacgacgtacttgtacttcatcaggtcatcgcctgcgtgctgcagggtgttgaagcggtagttgatctcctgctgaccagcgccggccacctcgtggtgggaacgctcgagaatcaggccgaccttctgcaggttggcgaccatatcgtcgcgcaggtcctgagtgtggtcaatcggcggaaccgggaagtagcccttcttgacgcggttcttgaaaccgatgttcggggtgccgtcttcctcaacgtcaacaccggagttccacggagcttcgatggagtcgacctcgtagaaggagcggttcatgccgttctcgaagcggaccttgtcgaagatgaagaactcggcctcaggagcgaaggaggccgtgtcggcgataccggtggacttcaggtaagcctcggccttgccggcaacctgacgcgggtcgcgggagtacggctcgtcggtcagcgggtcgacgatggagaaggccacgtcaagggtcttgtgcttgcggaacgggtcaatgaaagcggtctcaacgtccgggaccagcttcatgtcggactcgttgatggcctggaagccctgaacggaggaaccatcgaacggcatgccgtcggtgaaagcgtccttcaggaattcgctagccggcacggtgaagtgctgctgaacgccgataagatcggtgaaacggacggagacatactcgatgccttccttgttgataagggcctcggcgtcttccttggacttgagttcggtcacgggaccgctcctttcgtatgaaatataacggtatccatcgtaaaatcgcgcgtttcgccggctcgaaacttgggttacgagaatgtttcgtgactgtggccgacaatcgcgcaggcgcgttatttcaacgaaacatcattacagaatggaaacggaggctatcgggggagtgggtagaggtgtccgcaacgtggacagtggatattgacaggtgacgtaggtggatgtatgtggacgcgattatgagacatatgacgaagccccggaaccgattgaacggattccggggcttctgtgcgatttggtggtgtgctgccgatcagcgaccgcgcatcgcgcggcgggagatcttctgcgggtggttcgggtccatgcccttggggatggcataacccttcttggcctgcagcgtgcgcagacgatcgttcagcgtttccatctcggccttggtcagcaggaagcgacgacgcggatgaatcttggcgatcagtgcgttcttgtggttcgtgggctcatagctcttggacttggtcaccgtgctacgcagcttgtccagtggcacctgcttggggccgtggcccacggagatgcggtacaccggaatggaggagccggcggtgacgcccttgatatcgtgttcctgacgatccatcgccttcatgatgcgaccgtattcgccttcgccgatcaggtagatgccgttcatcgaagtgccgcgccagatggcatccttggtcttcgggtcgatccacaccggttcctgcgggaagttaaagccggctttctgcatgttgctcagcacgccgatggcggcaccaggcttgccatcaatctgcttgtagccgactgcatccgcgcggcgggtgagcatcatggtggccagtagcatgccgagcatgatggcggtgatcatggtgaagatccaggtcagccaggtccacttggcaatcagaccgatgatgatcatcacgactacaggcagcaggaaagcaccggcctcaagccacggcagggccttgtcttccttagccgtgtacttgtagatctggatgatctgcttgattgtgctctgcttcttcggcttcgcgtccttttccgccatcacttcttcctttgttgggacgaaacacactagacaacatcttatcaggtgcgctggtccgaacttgtttgtgctggttggtctcagcgtgtgtgcaacggccgtccgtcggccttgagcagcgcctcgccgagcgtttcactgaacgtgggatgcgggtgaacgaggcgggctgcgccggcgagcggcacatggttgccgaccagctgttcggcttcggcgatgatgtcggaggccatctgggagaccatgtgcacgccgagcacgcgcggggtgtccgggttggccgcgtcgcagccggagacgatggtcagtgaaccggccgtgccgctcatcagcatgcgcgcgttcgccagcatcggatagttggtctccttgatttcaatgagatcctctctcgcctgcgcctgttcgacggtgagcccgaccgacgccgcttcggggaaggagaacacgatttgcggcacggtggcttcgtccaccggcttgggattgagtccggcgatggtctccgcgatgacgatgccttgctcaaaagcacgatgcgccagcgcgtgaccggccgtcacatcgcccaccgcccatacgcccggtttgtcggtgcggccgtacgcatccgtggcgacatgtccgtggtcgtcaatcgtcacgccccatgctgggtcggtgatcgggtcacgcccgatggcgacaagggcgatttcgccccagacgctttgttcgccgtcctggccttcgcgcgtgtagtgcacggtggcaccaaggttcgcgccggtgtccacatgggtgacgctggcgcgggtgatgatgttcacgccatgacgtttgagctcacgggtcagcgtggtgccggctctccggtcccaggctgagagcacgcggtccttgcgaatcagcagggtcaccttcgaaccggcggcgttccacatcgaggcgaattcaagggcgatggccccggcgccgataatcaccgccgacgagggaaattcgttgacttccagcgcctgtgtggagtcgatgagggcgccggcgaacgggttgccgggcaatgggcgtggcttggcaccggtggcgatgacgatgttcgtggccgtgaggtccatcgtggggccgctgggctcggggacatcggccttgtgataggtgaggatgtcgctttggtcgggggaagggacgaggtggacgatgtggttggaagttgctggagcggtctcatccgcatggaacgcggcattggctcggaacacggtgatgccgcgatgggcaagcagtccggccagtcctcccaccatcgtcttgaccacgcgcaggcgatagtcgcgcagcgtgccgaagtcgatgccattcaccgaggcgttgacgccgagctcggccgcacggtgcacggtgtcgatggtgtgggtggcggtgatgagcgccttggaggggatgcagccacggttgagacatgtgccgcccacggtggcgtcacgctcgacgagtgccactttcatgccgagttcggccgcgcgcagagctgtggaatagccgccggggccggccccgatgatgaccagatcaaactgttcgctcatgattgcctccttgatacatacaagtatggctcccatgttagggagccatatgcggctatcgccgccacttcgcctaaaaacagtccactggactgttttctttacggctcagcccctcaacgaggggagccagagtatatatggacaatcagtctgccggccagtgaccgcgcttcgggtaacgtggcttgggaagcctccaacgacgcatctgaatcgaacggctccaagcgtaggagaaggagcgggagcccttggacacggaccgttcgccgtacttggcgatgagcttggccttgagcttgcgccacatcagccatacgtcgatgatcacggcaatcaggtaaccgtacataagcgccatcatgatgatggaagcccactggttctgcatcaaagaagtgacgaacatggagacgatcagaatcgcgaaggccaccgggatgaaccattcgccaaggttgaaacgggcatccacataatcacggatgtagatacgccaaggcaagcgttccgccttgggcatgtggttgatatcgccattctgcatcgcctcgtactcggcgttctccttctcacgcaggcgggctttggcggccttggcgctggccctgcggtccaccggaaccagcggacggataccggcggcctgagcctgcttcatcttcggggtaggacggccttttttctcagaaggattggcggccttcttcggggcctgctcaacaggagcttgggcctcttcttttttcttaaacggattccatgtcatgctttgaggttacggtgacgttcagacacttgtacactggcgcagccattgcaatgacgccgctcacacacatatataaaggaggaccatcatgacaacgctcaccgctgacgagattcgttcgcgcgtcgaaaccgattggaaccgcatcgtcaaggtgctggccgaaaaggtcgcgctgcagtcgatctccgccaagggcatcaccgccgaacatatgaagcgctccgctgaattcgtggcagacgaactgcgcctcgtgggtgtggataccaaggtggttcaggcttccaatgccgacggcactccgggcgcatgggaggtcatcggctcgcatatcgtttctccggacgcccccaccgtgctgctctacgcccatcacgacgtgcagcctgttccggacccggccgagtggaacaccgacccgttcgtggccaccgaaatcgacggccgcctctacggccgtggctccgccgatgacggcggcggcatcgccatccactccggtgcactgaaggccctgggcgacgacctcaacgtcaatatcaaagtgttcatcgaaggcgaagaggagatgggctcgccaagcttcattcccttcatcgaggctcaccgcgacgaattcgccgctgacgtgattatcgtggccgattccggcaactggtcggcggacattccttctttgaccacctcgctgcgcggcaacacctgtgtggacgtgaccgtgcagggccttgagcatccggtgcactccggccagtacggcggcccgattctcgactccaatacgttggccgccatgctcatcgcttccatgtatgacgagaacggcgatctggccgtacccggcgtggccgcggaagagccgatcggcggtttgcagcacgaccttgacgaaaccaccgtgcgcgaggattctggcgtggtggccggttacgagttcgccggcaccggttcgctggcctcacgcctgtggaccaagccgtccgtgaccgtgatcggcttcgacgcccacccggtcgagggatccttcaacgtgatcgccccggagacccgcttccgtctgtcgctgcgcaccgcgcccacccagcgccctgaagaagcgcaggaagcactggctgcattcctcgaatcccacgcgccgttcggtgccaaggtcactgtcgaacgcggtgaaaacggcatgggctgggccatggacccgaccgccgtggccaccaaggacgcgctggaagccatgaccgaggccttcggcgttgagcccatcaacaagggcgaaggcggctccattccgttcatccccgaactgcagcgcattttccccaacgctcaggtgctggtcaccggtcccgaagacccgaaggccaacgcccacagccccaatgagtccatctccctgcccggcctcaagaacaacgtgatcaccgaggctttgctgctggacaagctcggcaagtagccgaaccgcatcggtaatggtagtgagccgccgtcaggtaggtcacagatgtggctattgcctttgacggcggcttgctttatagtcgggagttgacacgggagctgccgttgggcggctgagaggagactcatagtctcgaccgatggaacgtgaccggataatgccggcgcacggaaatgtcgctcttacccacccgtgcctgaaccaacccgcgcgtggccacgaacatgtgcattatgtgcgtacatatatccatgtatgttcggcctgcgtgcgagcagaagaaaggcacattcatgactgaagctgtggccaaagccaattacaagtggcgcgtcgtcgatatcgtcgtcgccgcaatcatcgccgtcgcatccggcgtcattttctggggctgggacattgtctgctccgccccgctggccctgttcgagggcgtgacccccggtttcgagggtctgctcaacggattctggctgttcgccggcccgctcgctgcaatcattgtgcgcaagcccggtgccgcactgtttgccgaaaccctcgccgccttccttgaacttacgctgggcaaccagtggggcgtcggcggctcgctgatcgtcggcatcatccagggtctgggtgccgaaattgccttcgccgtcttcgcttggaagaagtggaacatcggcaccaccatcctgtccggtgcgctcgccggcgtgggctgctgggcctactactgggccaccaacccgggctggaacggcctgcgcgtcacttggtatctggtgggctccatcatctccggcgtcgtgatcgccggcgtggtggtctggtacttgtctcgtgcgctcgccgtcaccggtgctctggagcgctttgaatccggccgcggcaaggcgcgcgtctgatgcagattaatccggctgcggtagaggccagcggctggggatggcggcacgccacgcgtaaggacttcgcgttgcgtgccgtcgatttcaccatccggccaggtgaacgtgtgttgctgctcggtgcttcgggcgcgggcaaaagcacgatgatggctggtctcgcaggcgtacttggcggcgatgaggaaggcgagcaggagggctcgctcaccatcgatggcgtcgatgcgcgcgaggcgcgaggccgcgtgggactggtgcttcaggacccggactcgcagatcattcttgaacgactgggcgatgacgcggccttcggctgcgaaaacctcaacgtgccgcgcgaggagatttggcagcgagtgcgcgaatcattggatatggtgggactcggcggactcgaactggatcggtccacccgccatctgtccggcggtcagcgtcaacgtctcgcgttggccggcgtgctggctatgaagcccggtctgctgttgttggacgaaccgaccgccaacctcgatcccgaaggcgtggtcgaagtgcatgacgcggtcaaaaaggtcatcgaggccaccggacagaccatggttgtggtcgaacatcatatcgatgtatggctcgatctggtcgatcgcgtgattgtgctcggtcgacccgatgcaagttcgcccacgggtgcggtcattgccgacggcaagccggacgaggtgttcgccgagatgggcgacgtgttggccgccggtggcgcgtgggtgccgggccgtgcgattcccgattactcaccgaagcaggagtctgcgcacgatgcgccggtgctcagcaccgagaacttaagctttggccgtggggccgctcttggcgttggtatcaatctggatttttatcccggcgaagtaacggctctgatgggtccgaacggcgcgggcaaatcgaccttggccttgaccttggccgggctactcaagcctatcgccggcaaggtgctcatcgccgacaacctcaagcccgcgcatgccgggcgtgagccgatcgactggaaaagcaaggaactgctgggccgtatcggcatggtgttccaggagcccgaacaccagttcgctgccaatttcgtgcgtgacgaagtcgccatcggccccaagtcgatggggcagagccaagacgaggcttatcagaccgccgaccgcatgcttgagcagatgaatctcacgcgcttcgccaaagccaacccgtacaccttgtctggcggggagaagcggcgactgtccgtggcttccatgctggccgccgcacccaaagtgttggtgatggatgagccgacattcggacaggatttcagtacgtggaatgaaatggtcaagctgattgccgccatccgcgaccaaggctcgtgcgtgatcatggtgacgcacgatgaggcgctggtggatgcgctgggcgcacgacgcgtgatgttcgaggaggcgaaggcatgagtgacgtggtaaccgtcagcccgcaggaaacgcgcgtggagccggtcaaagcctcatcgccctcatggttcatcgcgcgcatcaacgcggtcagtcgcatcatcggtgcgttgctgctgtgcattccgatgttcatcagtctggatgtggtatccgcatccacggcgctcggcatcgaattcgtgctgctgtggattggtggcgtggctccgtggaccgtatgccgtaagacctggccggtatggatcgccgccgccggcagttttatctccgtgttcctctacggccgcacctcgggcgagatcctgtggcagggtggctggattgtgatcagcgaggggtccatcaatctggccatcgccacggctatcagggtggcggccattgccgtacccggcgtgattctggccttgggcctcgatcccactgatttggcggacggtctggttgagattctgcacttctcaccgcgattcgtatacggcggattggccggattgcgcatgtttacgctgctgcaggaagattggcgcgcactcggcttgtcccagcgttcgcgcggccttggtgacggtaacgccatcgcccgtgctctctcccaagcgttcggactgctggtgctctccatccggcgtgccaccaaacttgccaccgccatggaagcgcgcggcttcggctccggcgccccacgttcccaagcccgcatctcgcgtctgaagcctatcgactggatcttctacgtcatctgtctggccgtcccgctggcctccataggcgtagccgtcggcaccgggaattggcacttcgcctttcagggggtctgaaaggcggcaggctggcacagtgcctttcaggggtctgaaaggcgacaggctggcacagtgcctttcagggtgtctgaaaggcgacagattagcacagtgcctttcaaggtgtctgaacgccttatgatgcccccgctggcgggggctgtcggcgtagccgactggggtggttccagcctcgaccaccctcagtctcgcgactgacgtaatgacccggcagtagggtagtggctatgcccatcaacgcccagattcttgataatccgaaatccgaccgcgtgcgccgcatcgccgatctgacccgcgccaaaggccgcgaacgttcgggccgttttcttatcgaaggcccgcaatccgtgcgcgaggccgtcacttggcggccggacgtggtgcaggacctgtatgtagaggtttcgcgggcgctggaacatccgcgtatcatctcctccacgttggagaagatcgtcgaaacctcgcaggatgccacgatttatgtgcactactgcaccggcgacgtgatgcgccgcatcagtccggacgcccaaggcatcgcggccgtcggcaatgccgagtccatgcacgccggagccgatgacgtcgaacttggcaagaacggtcgggccccgcagattgccgccttctggcaggtgcgcgacccgggcaacgccggcaccgtgatccgtgcggccgatgcggccggctgcgacgccgtaatcttcgtggacgactgcgtggacgtgctgaacccaaaggtcatccgctccaccgcaggctccctgttccatctgccggtactcgccatgagcaccgacgaattcttcacctggacaggcgaccataatatggacgtctgggccgccgacgtatacggcaccgaagaacgcaagccggaaagcctgcccgcagtactggcggacaaggcggcggtcgaggctccgaaagccgtgctgttcggcaatgaggcgcgtggcttggaaccggacatcctcacgcgctgcggccgcatcgtctccatcccgctttatggcaaggccgaatcgctgaacctcggcacctcggccgcggtgatgctgatgtcgctgtctatgtcgggtcatgttgaaagaatgtgaaaccggtaaaaacgctgtgaaacgctgagaaaacatcagacgaaagggttctcgtggcagaacaaatggtgttcgacgccgaccaggtgaccgctgaggttgccgagggcatcgagaaaatccagaacgcctccaacctggaggagctcaaggccatcaagacaacgtacgcaggtgccgattcggcgatgaccaaggccagcaaggccattggctccctgcccgccgaccagaagaaggaagccggcaagctcatgggcaagctgcgcgccgacttcggccgcgcctatggtcccaaggaggtcgagctcaaggaagccgccgagaaggccgcgcttgccgccgaaaccgtggatatgacgctgccggtgagccgtaagcctctgggcgcccgtcacccgctgcctaagctgatggaggacgtcgaggacttcttcatctccatgggctggcagatctcctccggcccggaaatcgaagccgaatggtacaacttcgactccctgaatttcggcccggaccatccggcccgccagatgcaggacaccttctacgtcaagggcaatcaagccaaggacgccgccggtttcgtcggctccaacatggtggtgcgtacgcagacctcctccgatcaggtccgtgccctcctgacccgtggagtgccgctgtacatcgcgtccccgggccgcgtgttccgcaccgatgagctggacgccacccatactccggtgttccaccagtgcgaagccctcgccgtcgacaagcacctgaccatggccgacctgaagggcgtgctggacaagctcgccgtcgccatgttcggccctgaagccaagacgcgcctgcgcccgagctacttcccgttcactgagccgagcgccgaactcgacctgtggttccccgacaagaagggcggccccggctggctcgagtggggcggctgcggcatggtgaacccgaacgtgctgaagtccgccggcatcgacccggacgtctacaccggtttcgccttcggcgtcggcatggagcgcacgctcctgctgcgcagcgacatcaacgacatgcacgacctggtcgaaggtgacgtgcgtttcgccgaacagtttgtgatgggggagtgattcagccatgcctatgatcgatatcgattggctcaaggaccatgtcgaggttcccgaaggcctgacctacgaacagctcgccaaggaccttgtcaaggtgggtcttgaggaagaggagattcactcctctcaggtgaccggcccgattgtggtcggctacgtggtcgacgccacccccgaaccgcagaagaacggcaagaccatcaactggtgccacgtggactgcggcgacgaatggaacgagaccgacgaagacggcaacaaggtgccgcgcggcatcatctgcggcgcgcccaacatgaaggccggcgaaaaggtcgtcgtcaccctgcccggtgccgtgctgcccggcgacttcaagatcgaaccgcgcaagacctacggccacatctccaacggcatgtgtgcctccgaacgtgagctgggtctgggcgacaaccacaacggcatcatcctgctgcgtcagtacggcttctccgaggctgaatacgaggctctgaagcctggtcaggatgccatgcacctgctgcacctcgaccagcctctgcttgagatcaacatcaccccggaccgtggctacacgctgtcctaccgtggcgtggcccgcgagtaccaccactccaccggtgccgcctacaccgatccggccgtggcactcaacgagaaggccccggaacctgctgactaccagcccggcaccccggtggacatcgatgttgaaatcgacgataacaatccgattcacggcgtgcccggttgcgaccgctactacgcgcgtatcgtcaaggacttcaatcccaacgcccacacgcccaactggatgcgccgccgcctgattcgcgccggcatgcgctccatctccttggccgtggacgtgaccaactacgtgatgcttgacctcggccagccgatgcacgcctacgacctcgacaagctcgaaggcccgattgtcgtgcgccgcgccaacgagggtgagaaactcaccactctggacggcaaggaacatgacctgagcgtcgaagatctgcttatcaccgattcgccgaacggcgaacgcggctcgcgcatcctcggccttgccggtgtgatgggcggcctgtatggcgaagtgaccgccgacaccaagaacattcttctggaggccgcgcacttcgatcaggtgaccatcgcccgttcggcccgtcgccacaagattccatccgaggcctcccgccgcttcgaacgtggcgtcgacaccgcgctgcagcctgccgccacccagatggccgccgagctcatggccaagtacggcaacggcgagcccagcgaacacccgaacgacgtgaacaacacgccgcgcgccaaggccatccacttcaaggcctccgaagtggcccgcgtagccggcctcgacgtggacatcaaccgcatctccgacatcctgaccgacattggctgcacggtggccggtggcggcaacggtgagttcgccgtaaccgcgccgagctggcgtccggacttgaacgagccgtgcgacctggtcgaggagatcgcccgactggtcggctacgaccagattccgatcaccgtgccgccggcaccggtcgagggtctggtgggcctgaccccggaccagcagcgtcgccgtcgcgtggcggacgagctcgccgagttcggcatggtcgaatcgctgagctacccgttcgtgggtgacgacgattacaaggccttcggcttcgacccggaagccaccaagaaggtcagcgtcgagatcgccaacccgctctacggcgaccgtccgtacctgcgtcgcgagattctgccgaccctggccaccaccgtgcagcgcaacatccgccgcggcatcgaaaacgtgtccctgtacgagctcggccacgtctacctgtgggatccgaacgcgcccgccatcccggcactgcccggcggcgtgcgtcccaccgacgaacagctcgccgcgcttgacgccggtctgcccgaacagcccgaccatgtggccggcatcctgaccggtctggccgaggacgacggctggatgggcggcaagcgcccggtcgactggtccgacgccgtcgaggccgtgcgccgcatcgccggccgtatcggtgccgcaatcgaactcgaccagcccgccgccgacgatgtgcccgtccaatggcaccccggccgcgccgcccgcgtcatggtgggcgacgtcttcaccggctgggttggtgaactgcatccgcgcgtcaacgaggcgctcggcttcccggcccattccgcggccttcgagctgaacctcactgcgctgttcgccacgctgaccggcaagcccgtccaggccaaaccgatctccacgttcccgccggtcaagcaggatttggccttcaccgtggacgagaccgtgaccgcaggccagcttgagaacgtgattcgcaaggccgccggcgcgaacctcgaatccatcgaactgttcgacgtgttcactggcgaacaggtgggcgagggcaagaagtccctggcctatgcggtggtgttccgttcgccgagcaagacgctgtccgccgaagacagcgacgccatccgcaaggccatcgtggctgaggccgccgaaatcggcgcccagctgcgcgcctgacccaaccaatcatccgaatcgaggagcgccatgagccaaccggagcaggacaagccgaaatacgggcagtaccagcagcctgaatatggtgctatgtctggccaatacgggccgaattacaacccgtatatttatggcgctcccgagccggatactaagaaggattccgccgcagccgctggcgacaacggtggcgcggcacaatctcagcaggctggccagccgtatggtcagcagccggcgtggcccggcaatcagcaggcgggcggctggccgtatgctcaaggcggccaacagtccggtccgggcgcatatccgggcgggtacccgggcatgcagggccagccgtatggtcaacagccgaacggtcagcctcaccagccgcattattaccacggcatcgacctgaacgatccaaaccagaacccgctctacgggcactgggattcgtatgcgatcatctcctttatcctcgccctgttcttcccggtgccagtgctctcggcactgatgggcgcggtggcaatgtggcgcacgcgcactttccatatgaagggcttcggtttggccgtggccgccgtggtaatcaacgtgctgtacaccatcgccgtcatctggatggccttcaatggctatgacgccatgggcctctaccaggaagccctccagcaactcaccggcggcaccggctcctcctccgactccatctccgcataagtagtgttcacataccaacacacccactgcataaatatgcaatagtctgcataatcgcgtatactcgtccgaagacacatcagtgaaaagagatgagtatggcgaaatatacagtggccgtggccggtgccacgggctatgccggcggtgaagcgttacgcattctggctgcgcaccccgacttcgacatcacctgcgtggcaggccattcctcagtgggggagtcgatggccaagcacatgccgcatgttccccaactggccaatctggtcgttgaagataccacgcccgaagtgctgaacgggcatgacgttatcatcctcgcactgccgcacggtgcttcgggcaagctcgcctcgcagctcgatccgaatgccgtggttgtggatttgggcgccgaccatcgcctcgaagaacaggccgcttgggatgagttctacggcggcgatttctatgagcattggacctacggcatgcccgagctcatcaccggcaaagccgcggacggctcctacacccgccagcgtgcggcgcttcctggtaccaagcgcatcgcaggtcctggctgcaacgtcaccgccaccacgctggccctccagcccggcatcgccgaaggactggttgaatcgcaggatatcgtggccgatctggtcgtcggatactcgggtgccggcaagaatctcaagcgcaccaacctgcttgccgccgaggccctgcaatccgccctgccgtattcggtgggcggcaagcaccgccacattcccgaaatcctgcagaacttcgcccacgcggccggcaagagcgcggccgaagccagcgaattcacgctcggcttcacaccgattctcgcccccatgtcccgaggtatcctcgccaccgtgtccgcccgcatgacggacaaagccaaggcactgagcgatgaggagattcgcgccgtatggtccaaggcctatgaaggtcaggacttcatggtgctgctgcccgagggcacactgcccgccaccggcaacatcatcggctccaacgcagcccacctgcaggtcgtcaccgaccgcaaggccggccgcatctacgcttttgccgccatcgacaacctcaatcgtggtaccgccggacaagtggtccaatcactgaacatcgcactaggcctgccggaagacgcgggcctgaccaagatcggagtagcaccgtgagcgttacatttgcacaaggtttctccgccgccggcgtggcggctggtatttcatccgtcgaaggcaagaaggacttggccctcgtggtcaacaacggcccgctcgacgcggctgcaggcgtgttcacctcgaaccgtttctgtgccgccccggtgcagtggagccgtaaggtcgtcgccgacggtcacgtcaaggccgtgattctgaactccggcggtgccaacgcctgcaccggcgaggccggttacgcccagtccgtcgccaccgcggaaacggtcgccggtctcatcggcgccgaaccgaatgatgtggctgtctgctccaccggtctcatcggtgaactgctgccgttggacaacgtgctggctggtgccaagagtgcccatgaggctcttgccgccaccgccgaagccggtgccgacgcctcccacgccatcatgaccaccgacaccaagccgaagacggtcgaactgaccggctccaacggctggaagatcggcggcatggtcaagggctcgggcatgattgccccgcagctggccaccatgttgtgcgtcatcaccaccgatgcggttgtctccgccggtcagatgcaggccgcactcgctgtggctgccgaacactcgttcaaccgcatcgacgtggacggctgcatgtccaccaacgacacggtcctgctgctcgcctccggtgcctctggcatcgaaccggacaaggacgaattcaacaagctggtgcgtgaggcctgcgcatccctgtcccgccagatcatcggcgacggcgaaggtgcctcccacgacatccgtatcaccgtcaccggtgccaccagcgaagacgcggcacttgcctgtggtcgtgccgtcgccgcctcgaacctgctcaagtgcgccatctccggcaacgatccgaactgggggcgcatcgtcagctccctgggcactgtgccgcctgaagtcgcgccttacgattcgaacaaggtgaccgtggacgtcaacggcgtgcgcatctgcgagaacggcggtgccggccgcgaccgtagcgaggtcgacatgactccgcgcgaagtccacattgacatcgacctgaacaccggctcgagtgcgcaggccaccgtctggaccgacgatctcacccacgaatatgtccacatcaacgccgactacgaaagctgacaaacagcccagtgggctgtttgtagcagccggcagcgatagcgtcgccggcgtcgcagaaaagagaaaaattgtctacagaattgaagggacctgggttccatttcgacgtgcacaccgatttgcgcgccgatcagaaggcagaagtgcttattgaagcgctgccatggctggaggagttcgccggccagcgtatcgtcgtcaaatacggcggcaatgccatggtcgatgaccatctgaagcagtgcttcgccgaagacatggtctttctgcgtcaggtgggtctgcacccgattgtcgtgcacggcggcggcccgcagatttcccacatgctcaaggctctcggcatcaaatccgaattcaagggcggcctgagggtcaccacccccgaggccatggatgtggtgcgcatggttctgaccggcaaggtttcacgcgaactggtaggcctgatcaacgcgcacggcccgctggccgtaggtctgtccggtgaagacggcggcctgttctcggccatgcagcgcaggcccatcatcgatggcaagtccaccgatatcggcctggtcggcgacgtggtttccgtcgatgcttcggcagtcgaggatctggtggccgccggtcgtatcccggtcgtctcttccgtggctccgaacgaagaagatgccactgaagtgctcaacgtgaacgccgattccgctgccgccgctttggctgccgctgtgggcgcacacaagctcgttatcttgaccgatgtggatggtctgtacgccgattggccggacaagaattctctgattggccggattggtgtggaaaccctgcgcgatatgctgccggacctggaatccggtatgcgacccaagatggaggcctgtgtcagggccatcgacggtggcgtgccccaagcccatatcatcgatgggcgcaagccgcattcgattttgaacgagatattcacctccgcaggcatcggtaccatggttatgcctgatgaaggactggaaatgaggagctcttatggctactgagcatgaggaaaaactaggtacggaagacagcaagtggctgggagagtactctcaggtccacatgaatgtgttcggtacgccgctgcgcgtcatggatcacggccaaggtgcccacatctgggatgttgacggtaacgaatacctcgatttcctggcaggcatcgccgtcaattccctcggatacgcccaccccaagtgggtcaaggcggttgccgatcaggctgccaaggtggctcatatcagcaactattttgcgtccgagccgcaaattgaattggcatcaaaactggtcaagctggctggtgcacctgaaggctccaaagtctacttcggcaactccggtgctgaaggcaatgaagctgccctcaagctcgccaagctgtatggccgcaccttgcctggtgccctgccttccatcggcggcaagcccgcacgcattctcgcaatgactcacggcttccatggccgtacgatgggtgcgctgtccgccacatggaaacccggtatccgcaagccgtatgatccgctggtgccgaacatcgaattcgtgcgcgccggcgacaaggttgccctgcacgacgcttttgcacagaccggtctcggtcgctatggcaagggtccggtggctgctgtgattctggaacttatccaaggcgaagccggcgtgcagccgttgggtgccgattacgtcaagttcgtgcgcgaactgtgcgatatcaaccacgcgctgctcattatcgatgaagtacagaccggtatcggacgtaccggcaagtggttcgcattccagcgtgacgatctgtccggcggcgtgacgccggatatggtgactttcgccaagggtgtggcaggcggattcccgatgggcggcatgatcgctttcggcgagaaacttgcggctctgttcactcctggttcccacggctccacctttgccggcaatccgctgggtgcggctgcgggactcgccactcttgacgtgattgaagacgagaatctggtggccaacgccgaagctcgcggcgaacagctgcgcgatggcattatggccaccggtaatccgctgttcgtttccgtacgcggccgtggtttgctggacgccgtcgagctcaagcatccctgctcccacgcggtgatgaactactgcctcgaacacgggctcatcgtcaacgcggtggctcccaatgcgctgcgtttcgcaccgccgctgattgtaaccgcacaagacgtggaccaggcacttgccgtcctcaaggatgtgcctacggacctgcccgacgactgatttctctctgtcactgccgacccaccgatccaaggagatcatcatgaccccagaacttcgccacatgctgcgtgacgacgacctcaaccatgaggaacagaagcaggtgctcgaacttgccatcaagttccaccacgaccgcttctacaagcagccgttcgccggtccgcaggccgtcgccgtactgttcgacaagccctccacccgcacccgttccagcttctccatcggcgttgccgagcttggcggctacccgctggtcatcgacaagtccggctcccagctgggccgtggcgagcccgtggccgataccgctcgtgtgctcaaccgcatggcttacggtgtggtgtggcgcaccttcggccagggccgcgtcgaagaaatggccaagtactccacccatccggtggtcaacgccctgaccgatgacttccatccctgccagattctcgccgacttccagaccatcgccgagcaccgaggcggcgtcgacaacctgaagaaccagaccatcgcctacctcggtgacgcggccaacaacatggccaactcctacctgctcggcggtgccgtggccggcatggacgtgcgcgtggccggcccctacggctacctgccccgcccggacatcgtggccgacgccaagcgcgtcgcggccgagaccggcggctccatcctggtcaccaccgatgccaaggaagcggtgaaggacgccgattgcgtgttcaccgacacctgggtctccatgggcgaggaggccgaatacgccatccgttccaagccgttctgggattaccaggtcaacaccgaacttatggcattggccaagccggatgcgctcttccagcactgtctgcccgcctaccgcggcaaggaagtcaccgctgaagtgatcgacggcccgcagtccgtggtgtgggacgaggccgagaaccgtctgcacgcacagaaagcgttgctgacttggttgaccggcaaggcccgtggagacgaaagcctgctcgcatgagtgaaaccggtccgtccctgcagcgccctgccaccagggcggcgcggctgagtgccatagaacaggcgctcgccacgcatatcatcacctcgcaatcacagctgtccaaaatccttatcgacgagggcattgcggtgactcaggcgaccctgagccgcgatcttgacgagatgcatgcggtgaagacccggctgaaggacggcacggtggcctacacggtgggtcgcagcgtcgttgcttcagaaggtgaggatgtaggggagcgcggtgaggcacagatgtcccgcgtgctgaacggactggtcacctcggtggctgccgccggaaatctggttgtggtgcacacgccttccggtgccgcacaatacgtggcctcggtgattgacaagcagccgatcgaaggcgtgctgggcaccatcgccggagacgacaccgtcatggtgatttgcaccaatgacgacaccgccgtctcccgctccgactggctactaagtctcgcttccaaataaccaacacgccgtgcataaatatacagtcctctgtatatacttgcatcagtttgtttttcagaccttgaacgaaagggaaccaatggcagataacaagcgcattgttctggcctactccggcggtcttgacacctccgtcgccatctcgtacctgaaggagcgcaccggcaaggacgtcgtggccgtgtccctcgacgtcggccagggcggcgaaagcctcgagaccatcaagcagcgcgcccttgcctgcggagccgtcgaatcctacgtggtcgacgcccgtgacgagttcgccaacgaatattgcatgaaggccctcaaggccaacgccatgtacgaaggcgtctacccgctggtctccgccatctcccgtccgctgatctccaagcacctcgtgcgcgccgcccaccagttcggtgccgacaccatctcccacggttgcaccggcaagggtaacgaccaggttcgtttcgaggtctccattgcctccatcgacccgacgctgaaggccatcagcccgattcgcgacctgtccctgacccgcgacgtcgagattgcgttcgccaaggagcacaagctgccgatcacccagaccgagaagtccccgtactccatcgaccagaacgtgtggggccgcgccattgagaccggcttccttgaggatccgtggaacggcccgaccaaggactgctactcctacaccgacgacccggccttcccgccggtcgaagatgaagtcgtcatcgagttcaaggaaggcgtgccggtcaagatcgacggacgtgacgtcactccgctgcaggccatcgaagagatgaaccgccgcgccggagcccagggcgtcggccgcatcgacctcatcgaggaccgcctggtcggcatcaagtcccgcgagctgtacgaggccccgggtgccgtggccctgattaccgctcatcaggagcttgagaactgctgcctcgaacgcgaacagcaccgcatcaagcgcgacatcgacaagcgctggggcgagttggtctacgatgcgcagtggttctccccggcgactcagtcgctcaacgcgttcatcgaggacacccagaagtacgtgtccggtgagattcgcatggtcctgcacggcggtcgcgccgtcgtgaccggccgtcgttccgactcctcgctgtacgactacaagctcgccacctatgattccggcgataccttcgaccagaagtcctccaacggcttcatcgacatctacggcctgccgtcccgcgtggccgcagcgcgcgacgtcaagttcggcaacggcatcgaggtcccggagaacaccgtcgagtaattcttactcagtcgcccccgctgcgaggctgtcggcatagctgactgggagtggtctttgaaaggactgtcctcagtcacactccatgtgacagccctcgccagcgggggcaactgtatgtttgaacacattgctacgcttaaacacagctattttcacttttcaaggagccttcatgactgagaacaacgaacatctggccctgtggggtggtcgctttacgtctggtccgtcgccggaattggcccgactgtccaagtccacgcagttcgactggcgcttggccgacgacgacatcgccggttcccgcgcccacgcccgtgctctcggccgtgcgggacttctgaccgccgacgagctgcagcgcatggaggatgcgctcgacacgctccagcgccacgttgacgatggctccttcgcccccatcgaagacgatgaggacgaggccaccgccctcgaacgcggtctgattgacattgccggcgatgaactcggcggcaagctcagggccggccgttcccgcaacgaccagatcgcctgcctgattcgcatgtggttgcgccgtcactcccgcgtaatcgccggactcctgcttgacctcgtcaacgccctgatcgagcagagcgaaaaggccggccgcaccgtgatgccgggccgcacccacatgcagcacgcccagcccgtgctgctcgcgcaccagctcatggcccacgcttggccgctgattcgcgacgtgcagcgactgatcgactgggacaagcgcatcaacgcctccccgtacggctccggcgcactggccggcaacacgctcggcctcgacccggaggccgtggcgcgtgagctcggcttctcccgcgtgaccgacaactccatcgatggcaccgccgcacgtgatctcgtggccgaattcgcgttcgtggccgccatgaccggcgtggacatctcccgcctgtccgaggagatcatcatctggaacacccaggagttcgccttcgtcaagctcgacgacggctattccaccggctcctccatcatgccgcagaagaagaacccggatatcgccgagctcgcccgcggcaagtccggccgactcatcggcgatctgaccggcctgctggccaccctgaagggcctgcccaccgcctacgctcgcgatctgcaggaagacaaggaggccgtgttcgaccaggtcgatacgctcgaagtgctgctgcccgccttcaccggcatggtcaggaccatgcacttcgacggcgaccgcctggaagaggaagctccgaccggcttcgcgctggccaccgacatcgccgaatggctcgtcaagaacggggtgccgttccgccacgcgcacgagctctctggtgcctgcgtcaagctcgccgaaggccgcggccaggaactgtgggatctgaccgacaatgacttcatcgagaccttcgccgcgttcctgccggccgacaaggctccgggagtacgcgaagtgctctccagccacggttcggtcgactcccgcaacggcaagggcggcaccgcttacggtcgcgtgcgcgagcagatcgccgacgccaaggccgaggtcgaagaactcaagctcttccccgcatccacgtcggatggctccgcctacaaagcccccggcacgttctagtcccaatgaagctccctctgatgagggagctctattttgttgttgtcactgcaacggcatacactgagaaaccgtaacgaacgggagccgtgaggctgagaggaagtcgccagacttcgaccggggaacttgacgcgggtcatgccgccgtaaggaatcgttgtcgcagatttgccgggttctccgatacagctttcattccgtttgcataattcagccgtgagacggtcgtgatggagccaatacatcacagcggtcgaacggtcgcatgattgggttcatgaatgggcgcaccacttaaggtacggttcgtttcgtgcacccttttttactatctgaaaggatattatgcaggtcaacggagagcaggtcacgctcgagacgccggtcagcgtcgccgattatctcgaagcgcacggattccgcgccgagcgcgtggccatcgaactcaatggtgagattatcccgcgcgataagcgtgccgacgccatgctcgacgaccagtgcgtcatggaaattgtgcagtttgtacagggtggatgaaaggaaaagctatgagcaatattaatccggttactgaagcatctgttgaggcgactccgctgccgccgcagcccgccgtcaccaatccggtcggcaccgccgcgccgattctcccggtggaagacaagccgctgaacctgggcggtcacgagttccagtcgcgattcattctgggctccggccgctacgacctgaacctcatcaaggctacggtcgaacatgcaggcacgcaaatcgtcaccatggcactgcgccgcgcgcagaccaccgagaacagcgtgctcgactacattcccgaaggcattacgctgctgcccaacacctccggtgcgcgcaacgccgaggaagccgtgcgtatcgcccgactggcacgcgaagtgtgccacaccgacttcgtcaaggtcgaaatcgaacacgagaccaagtacctcttgccggacaacgccgaaaccatccgagccaccgaaatgctggccaaggaaggcttcgtggtcatgccctacatgttcccggacccgattgcggcccgtcagctggaggaggccggtgccgctgccgttatgccgctcggttcgttgatcggctccaatatgggcctgcgcatgcgtgacttcatcgaaatcatcatcgccaacgcgcatgtgccggtcatcatcgacgctggtatcggccgtccgagccaggcctgcgatgcgatggagatgggtgcggatgcggtgatggcgtacacggccgttgcctctgctggcaatatcccgctgatggctgaggcgttcaagcacgccatcgatgctggtcgtgcggcgtatttgtctggccttggcaaagtgaccgagggacaggctgtgccgtccagcccgactacggggtatttgcactgacacttttattagctcccctctctgaggggagctggccgcgtagcggactgaggggagatggaaacatggagaaaacatggcattgactgatgaacaggtggagcggtacgcgcgccatctgattttgaagggtgtgggggtcaaagggcaaaagcggttgctggcctccagcgtgctcatcatcggagcgggcggtcttggttctccggccgccctgtatctggcggcggccggcgtcggccatatcggactggtggacggcgatgtggtggatatgagcaatctgcaacgccaaatcatccataccactgcacgtgtcggagcgcccaaagtggaatccgcggccacagccatccgcgcgctcaacccggatgtgacggttgatacctactacgagctcgtcgacgcgagcaacatcgccggcctcatcgaaccgtacgatctggtgatcgatgccaccgacaacttcgccgcaaaattcctcatcaatgacgcctgcgtgctggccggcaagccgtatatccatgccggcgtggtcggattcgccggtcaggtgatgaccgtcattcccggcgaaggcccctgctaccgctgcatcttccgcgacctgcccgccgccggtgagattccgacctgcaaggaagccggcgtactgggcgcggtggtcggcgtgatcggcagtctggaggcgactgaggccgtcaagctgattgccggcgtgggggagccgctcgtggctcgcatgctcactgtggatgccctgaccatgaatattcgacgggtcccactgccaaagcatgtgccggattgcccggtgtgcggtgagcagccgaccattactgctattgatccggccaactatattcagccggcctgcgcgatttagagctatgtggtgcccctccttgaggggtgccaagatcagaacgagaggggaagaacatgcctattgctttgcataatgcggtcgatgacgatgagagcagtgaagcatcgtaccgccgcatcacgccggcggaatttgccaagctcgacccgaatacggtcacgctgctcgacttgagggaaccagccgacttcgccgcccacccggtcgaaggtgccatcaatgcaccactcgaccctctggcccatgtgctcaaaaccgtgcccacagatcgaactgtcgtagtctattgtgctcaaggatggtggagcgaggaagtagctgaaatccttgccgatcgcggctacgatgtagcaagcctcgatggcggttttcaaggttatctcgactatcttgaaacccaccacgattaacggttcccgttgtcgttcttttggatgagtgtgcacggacatatttgtgccctacaatcggtcacggtattactcgatggattcttgaatatcgccgggtaatcgtaattcacaacaggggattgcactgaaccaacccaaaacgggaaggaccgaaaatcgtgggacatctgctcacccgaacgcagattcaacgcctggtcgccaagcacggccgtgaggtcatcgagcatcgccacatgcagatcgaacgctgctgctaccagcacggcaatgtcaccacgttcgaacattccgtgcgtgtcgcctgcctggctgtgtggatggccgaccgcgcacacctgtggtaccgcgtcgacctcaaatccctgattcgcgcggccctcctgcacgattacttcctgtacgactggcacgactgggataacggcgaacaccagtggcatggcttcacccatggccgcgccgccctggtcaatgccctgaaggacttcaagctcaacgatatcgaacgcaacagcatcgagaaccacatgttcccgatgaccccggtgccgccgcgctatatcgaaggctatctggtcaccttggcggacaaatgctccgccaccgccgagaccttctcgttcgaccggttcaacaagcgcgcgttgcccgccgcgaagccttacgccgagatcgaagcccgtcgatgatcatcacactcgaacattatttcctctggtttttgttctacagtttcgtcggctggatgtacgagtccattctcgtctcctgccaacagcaccgcttggtcaaccgagggttcctcaacggcccgctgtgcccgatctacggcaccggcgcgatactcggcgtcgccattctcggcaacgtacataacccgatcatcatcttcctgatttcgatggtgggcgccacgatactcgaatacacaacctcgtgggtcatggagcagctgttccacgcccgctggtgggattactcgaacttccgcttcaacctccaaggccgtgtctgcctgctgggcgcgttgattttcggcctcggcggcgtgggcgtggtacttggttcgcagccatatgtcgagcgggtcacggatatgattccgctgccgatgctgcatacgctggtcacggtactggccctgatcaccatcatcgacttggcggtcacggttgcgggcatgctcgaattcgagcaggtgctcgattccgtctctcaggtggtgcaggatgtggcggcacgcgccggtggcacgtggcagtggggctccagtgcggtatccgacaggatgcgtgagctttcgcaggatacggttgagcgtctgcgctgggccgtcaatggcgtcatcaacgcacagcagaagcgtatgctcaagtccttcccgaagttccaggtgccggatcgtcaggacatcatcgactctttgcgcgaacttatgggcccgcgccgctagaataaggcgttttactgaatcgcgcggctcggctggtgttcggcactgtcgccatgttctgcgaaacttgactgtgcccaattgggcagtcttattcacaattcgatagggagaagcgacaagctatggctcacgtcaccgacttcaaggaagcgggtttcaacaccctgcttgaggaactggaatggcgcgggttgatttcccagtccacggaccgggatcgactcgcagaagcactgaacggcgagcccatcacctattattgtggcttcgatcccaccgctgcatcgttgcatatcggcaacctcgtgcagctcatcaacatgcgtcacctgcagcttgcgggccatcatccgatcgctttggtcggtggcgccaccggactcatcggcgacccgcgccagtccggcgaacgtacgcttaacccgaaggatgtggtggccggctgggccgatcgcctgaagaatcagatcggtggcattctggacaccgaaagtgcgaacgccgtacgtttcgtgtccaattacgattggaccgcctcgatgaccgtcatcgacttcctgcgtgacgtcggcaagaacttccgtctgggcaccatgctcgccaaggacacggtcgcccgccgcctgaactctgaggaaggcatctccttcaccgagttcagctaccaggtgctgcagggcaacgacttcctccacctgtttgacgaataccactgcacgctggaactcggcggctccgaccagtggggcaacctcacctccggcctggacctgatccacaaggtgcgcggtgtggacgtcaacgtgttcaccagcccgattatcaccgatgcttccggcaagaagttcggcaagtccgagggcaacgccgtctggctcgacgccacgatgctcagcccgtacaagttctaccagttctggatcaaccgcccggacgtggagatggaaagcctgctgaaggcgttcaccttcctgcccaaggccgaaatcgaacgactggtcgaggaatccaagaccaaccccggcaagcgcgaggcccagaagaccctcgcctgggaggtcaccagcttcgtgcatggcgaggccgctacccaggctgccatcgacgcttccggtgcgctgttcggacgcggtggcaacctcgaagacatcgatgaggaaacgctggaatccgtgctcgacggtttcaaggtggtcgacgagaacggcgagcacgtcttccccgtctccaagcccggcgatcgcgtaatcgacgccgcccaggctgccggactgttcaagtccgcttccgaggcacgccgcgccatcaagtccggtggcgtgtatctcaacaacaaccgtatcgaggatgaggagcaggtgctggccgaagccgatttcctggcaggccgcttcgcgctcatccgtcgtggcaagaaggcgctcggcgccgtggaaaaccgttaatcaacaacgaattaaggaaaacaagtaatggcagaaggtaacgagcgttccggcaagtcctacggcggcggccataaggggtatggcgatcgccgaccgggcaaccgcggcggcaagggtttcaagccgcgcggcaagggcggtttcaagccgcgtcatgacggtgagggtttcaagccgcgtcgccgtgaggatggcgagggctacgcgccgcgccgtgacggtgatggcgagggccacggcggctaccgcaagtcgtacggcaagtccggcggcttccacaagggcggccgctccggcttcggcggcaagggcggttaccgcggcaatggtccgcgccgtgacggcgaaggcttcaagccgcgccgcgaaggcggctaccgttcccacgaaggtgagaacggcgagaatccgcgctaccagcaccgtgataacgatcgtcgtgatttccgccgtgatgaccgccgtgacttccgccgcgatggtgagcgtcgcagcttccgccgcaacgatgaccgccgagatttccatagggacgaccgtcgcgatggggaccgtcgtgatttccgtcgtgacaatgaccgtcgtgacttccgtcgcgatgaccgcagggataacgatcgccgtgatttccgccgcgatggtgagcgtcgcaacttccgtcgcgacgacgatcgccgtgatggcgaccgccgcaacttccgcagggacgaccgccgcgatgatcgtcgtgacgatcgccgcgacaacaaccgtcgtgacggcgaattccgcgagttttcgcaggaagagaagcgccagtaccgtgaggagaagcgttctgaatacatgaggcgtccgcgccgtaactccgacggcacgatgagcttcccctcgcagaacccgtacaccgaccgtcgtcccgacgagcccaagatgcccaagggcatggaatggtcgatgctgtccaaggatgagcgcgaacgtctgcgcggcctgtccaaggagcacgcggagaacattggtctgcacatcctcgccgctttcgcgctggaggagagcgatcccgaacttgccttggagcacgccaagtgggtggcccgtcaggcctcccgcatcgacttcgcccgcgagacgctcgcgttcgtggcctaccgtcagggcgactacaagctggccctgcgtgagttccgcaccgcctaccgtatgaacggcttcctcgactacctgccgttcatcgctgactgcgagcgtggcgtcggagagccgaagaaggccgtggaactggcgctgtccgatgagggcaagcagctgcatggcgctcccaaggtcgagatgttcctggtgtacgccggtgcccttggcgatttggagatgtgggacaaggccattgaagtggttcacaccgtcggccgttcccagggtctgccgggtgagtaccgcatgcgtgccgtgcaggccgagcagtacttccttgaagaggccggccgcagcaaggaagccgagcagctcaacgacctgctggaccgtcttgaggaccagtatgccgacgaggagattgacgaaaacagcgacgacgtggtgatcgatcacgatctcgaagacatcaccgacgactccgacgtgctcgaaaagctcggcatcgatccggatgaggcgcagtacgccccggatccggagcaggaatacggcgatgaggatgacgaggctgaagacggcgatgccgagtctgatgaggccgacgagaccgagaccgattccgccaatgacgccgaggctgacgattccgccgaatccgccgactccgactccaccaaacccgaaaccgaaaccgaaaccgaggagtgagcggcgtaatgacccgtttcctcaaaggcaccgatcgcccgctcgccgaggcctatcagcttgcgctgctggacctcgacggcgtggtgtatcgcggcaagaatccggtcgaatacgcggccgattccattcgtgcggccgaagccgccggcatgaccatcgaatacaccacgaacaactcctcgcgcttccagcacgtggtggccgaccagctcaagggcttcggcttggacgtggagccgtggcaggtcatcacctcttcggtggtggccgcccgtatggtggccaaggcgttgcccgccggcgcgcgcgtacaggtattgggcgccgagcatttgcgcgatgaggtcacccgcaacggcctgaccatcgtggacggtcctcaggaccgcccgcaggccgtcattcagggctggtatccggatatgacttggcagatgatggccgatgccgcgttcgcggtcgaggccggagccacgtatttcgtgaccaaccgcgacctgacgattcctcgtgaactgggcatcgcccccggttgcggatcgatgattcgcgccgtgatcacggccaccggcgtcgaaccggtcgcctccgctggcaagccggaagcgtacatgtacgatgaggcccgcgaactgaacgccgccgaaggccacgatctggtgcccaaggaggcgtccatcgccattggcgaccgcctcgacaccgatatcgaggccggtaaccgcggcgactacgattcgctggcggtgctgaccggtgtcaccaacccgaccgaactgatgctggctccggcacacctgaggcccacattcatcgcccttgatctgcgtgaactcggcgaagcccaaccggagccggtccgcgacgagagcggtacttgggaatgccgcaaggctagcgcttggtttgaaaacggacaggtacacgtcagcgaccccaccagtatggacggcctgcgcgccgccgtatgcgccgcatgggaagccgccgaccaaggcgcacagcttagcgaggccacggtaccggtgttcgccatcgaggcatagtcctatgcctacggatagcgaacatgcgccggtcaccgagcgataccccgaacttgcggatatcgatgaacaagacaacgaccgcaagcttgagacctatcgcaacgtgctggaatccttacaacacgagcttgataacagccgcagctagcagaggtgattcattctcccgccagcggaagatgacgtgaagtgctggatggtggctccatgccgagccaccccgttggtggatggtgggccgaaaggaagatatatgaccgagcagcatatcgatcccgcgactccacttgaccgacttgacatgatgctcgtggcttcgggactggtcgaatcgcgggccaaagcgcagcgactcatcaaggccgggcatgtgcgcgtggacggcgagaccatcaccaagccatcgttcatggtcaaagccgggcacagcgaactcgccgtggataagggcgacgactacgtctcccgaggcgcttacaaactcttgggcgcgttcgaaacctttgccggcaatggccttaccgggccggaaggcttggaatgtctggatatcggtgcctccaccggtggcttcaccgacgtactgttgcgcgggggagcggccaaagtcgtagcgctcgacgttgggcacggccagctcgacccgcgcatcgccaatgacgagcacgtcatcgaaatgagcggcgtcaacattcgcgaagtagaggccgacgacctgccttaccggccggcgatgatcgtctccgatgtctcctttatttccctgacctatgtgattccggtaatcgcgcgcatcgcggctcccggtgcgcagattgtgttactggtcaaaccgcagttcgaggtcggccgggcaggactcggcaaaaacggcatcgttgaagatccggcattgcgggagcgggcattacacgacgtggtcgcctgtgctgaacagcacggacttgacgtggcggccactgccgatagtcccatcatcggcacccacggtaatgaggaatacctgctttacgctgtcttgagatgaatgcgttggcagtctccgttcaccagcagcacgctggaggtacggtcgacgcctagtgcggtggcacacgtggcgctttccaccgcactgccgttgcgtagcatggcggagtccgctgtcaaagtccggcattgcagatggttggcttcaaccgtgacggctgtgatatggcgaaccgtgctgccatcctcatacccatccatatcaaaacgagaaaacatcgtactgcggagtggatgaacttccagagccctgctgttgacgtcatgacccttcaacacgccgttcaagcggactgtctgaccgctaatatgacgggtgcctagggagccattgacggacagatttccggaacaaacgatatcgccgttgcatcgtagtttgccggtaaaggttatttcatcgcaaataatgtcgccgccgacttcgatgtcgccgctgccgctgatgctggatacgcgaatatcaccatcacaccgcacaatgccacttttgatgaccagtttgtccccttctataactgaggcctcgagggtgctggtcacaatcatggtgtgaaaatgcgcgccatcggcaagacgggaacgttggtccactcctatggtgccgtagactcctttgcctatcagcgtgcaattctgcgtatgcttgcccatgatgataaaactccccttattaatatggacgtacagctttatggcttattgccacaataatgagcgcatccatgttgaggggggttatatcggtcacgatgtgagcagatagggggtataacgagcgcagttagggggctagccttggataaagtggtcgatctgatcctgcttgcccatgaggatgagttcgtcgttgcgatgcatgaccagttccttggaaccgtactggaactccttgcctggggccttgaggcccaccacggtcacgccgtatttgccgtgcacctgcacgtcctcgatgctgcggcctaccgcgtacaggggcgtgtggatcttgacgacggtgtacggcccgtcgatttcgatgtaatccagataattgccggccaccagatgacccacgcgcttgccggcatcggtctccgcattgatgatgtgacgggcgccgatgcgctgcagaatgcgcgcatgctcttgggacacggacttggcccacaggtcggaaacgccggcgtccagcaggttgccggtgatgatcaccgaagcctcgatgctgtcgccgatggccacgacggccgtgtcgaactgggaggcgtcgatctgctcgatggccagcacatcggtcatgtcggcctgaatggtgggcagatgcgcggaccaacgggccacaagctccggattcttgtccactgcgagcacatcctgacccatctggtcgagggtggcggccacggacccgccgaaacggcccagtccgatgaccagcacgcttttgttgccgctcggttttgctgccatgatgatggtcctctctatgtcagattgctgggtgccgattgaatggccgatcagccaacgataatgttttcctgcggataacgaataggttcgggagccatcggtcggctgatggagtaggcgatggtcaacgggccaagtcgtccgacaatcatctcggcggacagaataaacaggctggccggattgccggcgcttgccacgcccaccgaataaccacccaacgagaaggccgagcaggcttcgaacacggcgtccacgaacgcgcagccggtggtgaacatcagcatcatcgcaccgaccataaccagcgcaaagcaggccgtggtcacggacacggcggtcatctgaatacggcgggggatacggcggcggaacacggtgacatcgcgatggccggtgaatgcggcgcggcaaatcaagagaatcaccgcgaacgtggtgacacggatgccgccagcggtggatgaggaacctgcgccgatgaacatgagtatgctcatgaacaccttggtctcattcgtgacttcgggcacccaggaaatatcgaaaccggcggagcggggcatgacggcggcgctcatcgcacggcgcatcttcatgccggggtcatctgcggggaacaggccggtattgctccactcgaccagcaggaaccaagccagtgaggtggccaccagcacagcggtggtcaccaaagtgagtttggtgtgcaatgtccaacgtttcgggctgagccgccggcgtgcgcactgcaccagattcagcaccacggggaagccgagcgttccgatgaatgcactgatgagaatcggcagccccacgccccaacggttcacatgcagaccagtggcatccggcgtgaaaccggtgttgttataggccgacaccgcgtagaacagcgcctgccacaaggtacgccccatattgccatggttcacgcggaacaggtcgggcagcagcagcacgaaggtcagcacctcggcgatgatggaggtgcccagcaccacggtgagcacgcctttgacctcggaaagcttcgtggtgcccagctcgttcgcggtgagcatacgctgggagaccttgagtctgcgggaagcgccaagagccaccatcgaggcgaaggtcatgacgcccagaccgccgaactggatggagaacaggacgacgacctggccgaacatcgaccagtattcgccggtgttcaccaccggaatgccgcaggtggacagggccgagacggcggtgaagaacgcgatcgggaaattggtgaagatgatgtccgatgtggagatcggcagcagcagcaaaccggtgacgatgatgatcagtgcgccgaaatacaccatggacagacggcccgggtgcctgagcagacggtcggtgatgctgatacgtcgaatgcgcttggcggttttatcgcttttgtctcggctcagtacatcggctgaataccaccatgacagtcccttcgaggcctcctcattggcggaggattcgtcgaagtcattggccatgggtcctcaagctcctcaactgatactgctgtacggtcatacggcatgccatcgcgctgcgcacggcacgcgtacggtgatcgcgcggctgtatgccattgtatgccgaagccttacgttaatcgactctgcggaacgttgtcggcgacgcgccacgaagcggcatttttcgaacacctgtacgactgatgacggtgtctgcggctagaataatgagcagtgcgaccgaatcgacaggaggatgccatggccaagcgcaacgcggtggtggtgacgcataccaggctcaggcagaccggaaccgtagtggccgaggcggtgagccagctgcgagtggccggtttcgaagtcaccatcatcgacaacaccgaggcccccgatttcggcgtgcagccgccgtgcgtgtcggacgacaccgaaatcgtcgtggtcctgggcggcgacggcacgatactgcgcgccgccgaactcgtccactgcacccaggtgccgattctcggcgtgaacatggggcatgtcggcttcctggccgaattcgaaagcttccagatcgacgaggcgatccgccgggtcgccacccacgactattcgatcgacgaacgcatgatcgcccatgtggacgtctggctgcctggcaccaccaagcccattgaggattgggcgctgaacgacatcacgctggaacgcgccgaccggggcaagatggtcgaactgtccatccgcgtggacgatgtggagatgaactcgttcggcgcggacggcgtcatcgtctccacgcccaccggttccaccgcctacgccttctccgcgggcggtccggtcatgtggccgaacgtcaaggccctgcagttgattccgttggccgcgcatgccctgttcgccaggccgctgatcatcggctccggttcgacctttaccatcgatattctggacgattccatgtccgaaggctggatttgctgcgatggccgccgccagcgcgccctgccgcagggtacgcgcgtcatggtgcgcgaatcgcgcgataccttgcgcctcgcccgactctccggcgtgccgttcaccaaccgtctggtctccaagttcgatctgcccgtggtcggctggcgcgagcacgcgcgcaatgaggcctcgagccagccgctgcatcacgggcacacgctcccggcggccgcgtatgcggctggcgcgttgccggtgacgctggcgtcgctggtaccgatcccgacaagccgggcgaacgtgacggcaaggcaggagcctgatgctcgaagaactcgatatccgcaatctggggccgattcgagaagccgccattgcgccggccgcaggcatgaccgccatcaccggtgagaccggcgccggcaaatccatgctgctctccgcgatccgactggtctccggtggggccgccgaatcctcgcgcgtctcggccggggcggacgaggcttgggcccaggcgattttcgcgctcgcggatgatgccgtcgcatctgaacattccggcgacaccaacgatgccggtgacgatgccggttctgacgattctgacagcgggctcaccggtgctgccgtggccgtggccaaggcccacgacgcgggcgtcgaccccgaagacggcgaattgttcctttcccgcaccgtacgcgcttccggacgttcgcgggccgtgctcggcggcaagtccgtaccgcgttcggtgctgggggccatcgccggcgaactggtcatcattcatggccagaccgatcagctgaaaatcgcggccgccgcacggcaacgcgagtttctggaccgggtggccggagacgaagccgaactggccgcctaccgcaaggcgtgggatgcgctggccgccatggatgagcggctggaacgcctgcgctcgcaggaatcctctgcccgccaacaggccgactacctgcgcgaatccatcgaccgcatcaaccgaaccgacccgcagccgggggaggacgaggagctgaaggcgcgccgcgaacgcatcgaaaacgcggccgacatcgcccaaggcgtgggttcggcgctgggcgcgctggatgcctcgcaggtggatgtggacgccgccgacggcgcttcggccgtggaactcatcaatcatgcggtgacctcgttgcgcgcgattcgcgtcggcggcacgttcgccgagcaggccgatcggcttgaatccatcaatgccgatttgggcgacgtggtgttcgccctgagccaggagctgggcgacgaaggcagcgtggaggatctggaccagatcaacggccgtatccacgagcttggcgacctcacccgtcggtggggccccaccttggccgacgtgctcgcttggcgggacaaggcggcgttcgatttggaggatctggacgcctcgccggaaaaggtcgccgaactcgaatccgaacggcaggcgctgtacgatgcggccctcgccgccgccgacgtgctgagcgccgcgcgcgtggctgccgctgccgacttgggcgcgcgcgtcactgaagaactcggctcgctcgccatgctgggcgcctccttggaagtgcgcgtcacgccgcgagacaaggccgatgatccgctcggcccgtatggtcgcgacgatatcgcgttcctgtttacgccgttcgaggggtcgccgcagttgccgatgggcaaaagcgcttcgggcggtgaactgagccgactgatgctggccttggagctggtggccgccgacacgcgcggcggtgccgaccagaccttcatcttcgacgaggttgacgccggcgtgggtggcaaggccgcggtcgaattgggcaaacgtctggcacggctggcccgcagcgcgcaggtcatcgttgtcacccacttggcgcaggtcgcctcgtgggcggacgcgcagttcgtggtcaccaaggagccgccggatgccgatgacgacgatttgggcgtggtcaccaccatcgccgaagtcaacggcgaaacccgcgtccacgaaatcgcccgcatgctctccggcagcgaatccgaagcctccctagaccacgcccgagaactgttgaaggaaagtgtcctatgaccaaagccgccatattcgacctcgatggcaccctcctagactccatgggagtctgggaccaagtcgacatcgacttcctgaacaagcgcggaatcgaagtgccgcccgactacatgaccaaagtctccgccatgcaattccgccagatcgccgaatacaccatcgcacgcttcggccttacagacacgcccgaagagctcatgcaggaatgggacgacatggccagcgtcgcctattccaccacggtcgaagccaaacccggcgcgcttgactatctgcgcgatctgaaagcctccggtgtcaaactgggtgtcgccacctcgctgcccccgcatctgcgtgagccggcgctacgccacgtcggcatgttcgaactgttcaacgatatcgtctccgtcgatgatgcgaacgacgtcggcaaggaccagcccgacgtctacctgctcgccgccaagcgcctgggtgctgcaccggccgactgcacggtgttcgaagacctgttggtcggcatgaagtcggccaaatcggtcggcatgaaggtctgggccatgcacgacgactcctccgcctccgattggcccgaaatctgccacctggccgacggcgtcctcttcgacttccacgacgctccgcgcgtgctgtgataaaaaaagttacacccccgctggcggggctgtcggcgtaacggcgttgtttggcataggtgccccttcccgaggccattgtaggcgcggcccatgtttcgacactgtatgttggcaaggtgtttgttcactgtttagctgttatgtaacacaccttgacagttaagcagaacagttatactgtgttgtataacagctaaacagctggggtgctagtcaaccacaatcgaaaggggcataggtgaaactgatcatctcatccgtgtccggtgaacccatctacgagcaaatcaaaacccaaatccgttcggcggtgctcagcggcgagttgaaggcgggcgaggccctgccttccttgaggaaactcgccaaggagctgcgcatctccgtactcaccgtcaccagggcgtacaacgaactggccgatgagggcgtggtgcagaacattcaaggcaaaggcactttcgtgatggacaagggcaacgaactgatgcaacgtcagctcgaaacccggattcgtgaaagcctggccgaggcaagccggggcgccaaagccgccggcattccgctgaacgcattggaccgcatgctcggagaggaatacagcaaggaataacctcaagaaaggaccatggacatgaccgccatatccgaatccgacgcgatggcgttgcaggtcaccgacgtcaccaaacactatgattccggcttcacgctggacgacgtgaccttcgacctgcccaagggctacatcatgggactgatcggcccgaacggcgccggcaaatccaccctcatcaaactcatcctcaacatgatccaccgcgacgccggttcgattcacgtgctcggcctcgacaacatcgccaacgaggagcccgtcaaagaacaactcggcgtggtgttcgacttcagctacatgcatgaacagtggcaagtcaagaacattgaacgtatcgttgcgccactgtatccatcatgggacggtggatgctatcacaagtatctggatacttttggccttggtgacgcacagaacggcaagaaacatatcaaggatctttcccgcggcatgcagatgaagctgatgctcgccatcgcattgagccatgacgccaaactgctgattctcgacgagccgaccagtggactcgatgtgcttgcccgcgacgaactcatggatatactgcatgcctacattgaggatggcgaacattcggtactgttcagcacccatatcactgccgacctcgaacgtgctgctgacttcattacctacatcaccgatggccgtctctactacaccggtccgaaagacgagtttgaggaatcgttccgcctgattaagggcggtccagacgaactggcacaactgcctgcggacgtagtgctgggctcacatacgtatgccaccggattcgatgcgctggtccggtcagacgggcttgatgctgttgcgtcggtggtttcggggcttgtcgttgaatcggcttccattgatgacatcattcgactgaccaatgcccatgattccaatcgtgacttgagcgggaggtgagcggccatggaggcaatactgagggtgtcgcggtctcggcaacatgcattgaccactgcattgcgcgtcgatatggcctacctgtgcgtcggcgaacggactgtgttctcgttgttgttggcaccgttgttctccgtcatctttcaaggtgaagcttatggtgatggcttcggctatcgcatgggtgtcatcatgacggtattcacctgcgccatgtgggtgctaaccatggcggttgctgacttacagaacggatatcggcttcgtggcattattccggcttcgaggaagagtcaggtggccgcgcgatatgtggttggattggtgatttccgtattgtcgatagcgatgattgttctgattgacgggttgcaagtgctggtcaatccggattggtcattcgcgggcaatctgtgggcggcgccgttgggaggtttctgcaccgcgctgatgatcgcgcttatcgtgcccacgggttatctgtggaccaaactaggcggtcttcaagtcacgatgatggtgatctatgtcgttgtattggctgtatccatactgctatctattacgcctgcttcggtgaccagaggattggcccatgccgcgaatgccatcatcgagcaacgattgtggctggttattgcggtattgacaacgacggttgtggcatatggaatctcgtatgtaattgcctctcgcatatttgcttcaagggaatggtgacgatgaactggaaatccgtagtaaagcaatgtcgattcgattgtgtcgggacgggtctgtttagcgtggcgaatatggtatttctgctggttttcccggtgctgtctatcgtggtatcgctggtgacgataccgacccacgtcgatgaacacgttgccagtggtctgatgggcggactcggaggtttggcatcggcgatggcatgtatgagtgcattggggcctgcgtcatccgaggaatctgcagggcacagtgccatgcgagggctgattcctgtttcacgcactgcacaagttgtaggtcggtacctttttctgttggtggttggcctgctctgggctttggacgtggtgatatgcggcggcgtcttcattgtctttggcgatatagcagatatggggtggaccggtaccttggcagcaggtgctttcatcttcgctttggctatcattcttgggtcggtgctgctggcctgtgcataccggttcaccttccgcaagatgatggtggcctctggcgtggtcctggttggcttgtatgccgtcattgcgctgctggcccgattgcctgttgactggcaatggcttttgctgaatattaccgatttcctgacgatctggtggcatacggcgcttgttctcgccgtgttgtgtctgctcgcattttttggctccatgctgatagccatccgcatctaccgagccaaagaactctagccgcgcatttgtctgaacacgaatgaaaagagaccgacaggaatctgtcggtctctttccgttatcggtgtgttatcagtccaccagatccagagcgattggctggtgcggttgctgggaatcgctttcattggccgtgcggcgcgcgcggatggcggcggctgcgcgcttgacggtcttgataacttcctgcagcaccaccacgccgaaaccgaccgcgatgattttcagccacatgtcgatcggcagcggcacggtgcggaacatcgcgccgccgaattgcaccactagcacctgaagtgcgaacatcagcgcgaacacgccgatcatcaccttattgcgcagcagattggcgaacaggctggcgttgcccagctcgcggctgttgaaggcgttgaacagctggaataccacgaacagcgtgaacagaatggtcgactgctgttcggcggtgccgcccatgaagttcgtccagctttgcgccatgaacaccacggcgatgaacgcgccggagacgatgatgcgctccagcatgccgcgcgagacgatgccggcgtcgcggcgggtgggcctgcggtccataagattgtcgcgaatcggctccataccgagcgtcagcgcgggcgggccatccatgatgatgttgacccacagcagctgcaatgcggtgaacggcgcggccagaccactgaacagcgaggcgagtaccacgaccaccgaagacaggttcacggtgagctggaactggatgaatcgctggaaattctcgtaaatgccacggccccagtgcacggccttgacaatggtggcaaaggaatcgtccagcatcacgatatcgctggcttccttggacacctcggtgccggcgatgcccatggcgatgcccacgtccgcgttcttgatggcgggcgcgtcgttgatgccgtcgccggtcaccgccaccacattgccctgggctttcagagcgttcaccacgcgcatcttgataaccggcgtgctgcgggcgatcacgcggatgcggccgatttcgcgggacagttcctcgtctctcatttcctcgatctggcgcgcctcgacggcgatatgccgctcgtccagaatgccgagttcgttggcgatggccgtggcggtcacgatgttgtcgccggtgagcatcttgagctcgatgcccgccttgcggcagcgctccacggcaccgggcacatcctcgcgcaggggatccacgatggccacgaagccgtcgaacatcatgccggattccaagccggcgcggtcggcagcgtaatcgagagccgcagtgtcggcgtccttatcggaaatatggcggtgggcgaagccgagcactcggcaggactgcgcctggaacttcgcgatctcccgttcgatttcgccgcgcgtcttggcgtcgacggcgcacaggtcgagcatcttctccgggctgcctttggcgaacacggtaatgccgtcgccgtcacgcaccacagtggtcatgctcttggtctccgacgagaacggatacgtgtggagcaccgtcgcgcgctcgcggcgaatccggtagtcgagtccggccttgtgcgcggcgaccaacagtgcgcattcggtggggttgccgatgaattccggcatcgcgccggcctcggcttcggtggcgcccgggaaggtcacgtcggcggtgccgttgacgcagaagttctccagcagcatgcggttcctgatctgctcgggcttctccaaggcgcggcccggcgcattgtacgcctcgatcacggtcatgcggttctgggtcaatgtgccggttttgtccgagcagatcacgttgatgcagccgatggtctcgcacgccaccatcttcttgaccagcgcgttctgcttggacattttgatgatgttcaccgcgaggcacgcggccacgatggtcggcaggccttcgggcacggcggccacgatcagcgttatggaggtgatgaacgcctcggaaatcgtgtcgaacgaggcggtgccggaagccacgaaccgggccacctgaagcacgaacaccagtgcggccacaatcgagcccaccacggcgatcaccttgccgagcttcgcgagcttctcctgcagcggcgtcataccggtgttggcggcgcgcagttcgcgggcgatcttgccgaactcggtgtcgtcgcccacggcggtgaccacggcacggccattgccggcggtcacgaagcagccggaatagagcatgttcgtgcggtcggccaccggggtcttcgggtcggtgaacacggcgtcggcggctttggcactcggcacgctttcgccggtgagcgcggattcgtcggcggtcagatcgttcgattcgatgaggcgcgcatcggccggcagcttgtcgccggtgctgatctgcagcacatcgccgatggtgatgtctcgctgcgacaccagcgtgacctcgccatcgcgcaccacggtgacggtcgtgtcgtcattgatgtcgttcagcgcttcgaatgccttggcgctgcgaccctccatcaccacggtgatggtcacggacagggcgatggcgaagaagatgcccacgcattcgagaatgtcggcgtggccgccggccatggcgcgggtgatgttgacgcccagggtgatggccgccgcgatcataagcatgatgagcatcgggtcggcggccgtcttgacgatgcgggaaagcatcgattccggcttcggcttggtgaaggcgttggggccgtactggttcaggttgtgcgcggcctgttcgctggtcaggccttgatgtgcatcggtgcccagcgtgctgatgactgctggcgcatcctgcatgaatggtgcgggcgtctgcccgttggccgtggtcatatgttcctctcgtttggttgacacaccgcactgaaacccgcgtaatatcactcgcgtaccgcgcaacatggcggcacgcagccaaacgaatcgttgacgaccatgtatcgcatactccgcggtacatgagtctcgtcatttaaggcaaagccagaccgtaacggaactgccgacggccacgatgttgacttgccacattgcggtttgggccgagcccttcgccgcaatgctgtctactccctcatgggactattcagttgcagaaacagaacctaacaaaccacatggattttcccgttcgccggcagcatggcgattcccgccttcctagaaaaaacaagcaacacgccattggctcgttgcaggtgaaaagccgcaagaaagccgcgcgtgacaaggctcggacatgcttgaacatgcctggaccttcgacttgtgacatcagaaaacaaaaaaccgatacatgctggtaaagcatgtatcggttgggaattgtcagttagtgccgtcagcggactatcacagcgcctgggcggccttctccacgtagtcctccatgccgtcgatggccacgacgtccttgaaccgcacgtcggcggtctcaagaccacgcagggcggccggggcggtggtgccggtctcgtgggccagcacatccatgcactcgaagtcggtgccggtggcgtcgaagcccaatgcctcgttcaccacgcgcgggaacttgtaggggctggcggtggagagcagcacgcgcggggtcaacgggtcgcgcggcatctgctcaagcaggtagtagccgcaggcggtgtgcgggtcgatcacgtagtggttctcgtcccagcagtgcttgatggactcgcgtacctgatcctcatcggcccaaccggtgccgaagatctgacgaatcttggccagcagctcttccgggatctcgtacgtgccccacttgttgaggtcgttcatcagcatggagatcagacgggtgtcgccctcggacaagtagtacaacatgcgctccaggttggaggagatgaggatgtccatcgagggggagatggtctggaagaacgggcgctggcggttgtaggtaccggtggtcaggaagtcgaacagcacgttgttcttgtcggaagccaccacgaggtgcttgaccggcagaccgagcagcttggcatagtagccggcgaggatatcgccgaagttgccggtcgggaccacaaactcgacctcatcgccgacgttgatcacttggtcggcgagcagctgggcgtaagcggagaagtagtagacgacctgcggcaccagacggcccacgttgatggagttggcggaggaaagcaccacgtgcgaattgccggcgagacgctcggccagggcgcggtcgccgaagatgcgcttgaccgcggactgggcgtcgtcgaagttgccttccacggcggccacctgcacgttggagccggcttgcgtggtcatctgcagctcctggacctgggagaccttgccttccgggtagaagacggtgatcgcggtgcccggggcgtccgcgaagccggccagcgcggccttgccggtgtcgccggaggtggcggtgaggatcatgatcttctcgtccgcgtcgccatcggccggcgtggtgtgcgccatgaagcgcggcaggatctgcagcgccacgtccttgaacgcggaagtcgggccgttgaacagttcgagcacgtaatcgtcgcccaggggcttgagcggggtgatgcgctcgtcggaccactgttcgccgtaggcgtcggcgatgcactggcccagctcctcggccgtgaagtccggcagcagcgcgcccagcacctcggcggcgatttgctggtacgacttgcccggcagggaggccacgtccaccttggtcttgcccaacgcgtccgaaacgaacaggccgccgtcatcggcgatgcccttacgaatcgcctgcttggcggtcagcgaatcggtggtgctacgggtggaatggaaggtggttgtcacgatgaatccttctgcctgaaagggatgatgaatccacatcagtctagcgtgggccgtgggcagaagggccgtccgtctcgcataaccgaccggtcgcaccggcgaaaatcaccattgccatcgaacggggaccggccatatcatgaaacaggccggctgcaaacgggccatacggtaaggcgacaacggcgaatcaattgtcgcttataccaaagagcacccatgaccgcttcaccccttgcgcagaaggcaaccgatgctttcaacgcgccgatctgcgaaaccgatcctgagatcgccgaactgctggactccgaactgggccgccagcgcagtggccttgagatgatcgcctctgagaacttcgtgccgcgagcggtactgcaatgccagggctccgtgctgaccaacaaatacgccgaaggctaccccggccgtttctaccacgccgaggcgtacggcgtgaaccccgagaccttccgcaccgacccggagatcatccgccagcgcacgctcgacggtgccaagatccttgccgaacgactactggccgacgacgtcaaggccaacggcatctccgtgctgaccggcggcaccgatgtgcatctggtgatggtcgacctgcgcaacagcgagatggacggccagcagggcgaggatctgctcgccgcctgcggcatcaccatcaaccgcaacaccgtgcccttcgacccgcgcccggcctcggtggcctcgggcctgagaatcggcacgtccgccctggccacccgcggcttcggaccgaaggaatacgaggaggtggccgacatcatcggcaccgcgctcgccgccggcccgtccgccgacgtgaccgcgctgaaggcccgcgtcgacaagctcgccgaagacttcccgctctaccccgacctggaccagattcactgattttttgcggatgtacgcggctccctcatcagagggagccgcgcttatatccccggctatcttcggtgcaatatgggtcgaaacgggcaatgcggcccattgtgggttactcttgttttttatgagcgatgaattgagtcctgaggtgttcgacgcggtgtgccgccaggccgatcaggccgcacgcgcacaggagcgtcttgcacaggcaaataccgaagccaaaaacgaactgctgcttgccattgcggacgcgttggacgagcatgctgcggacatcgaagccgccaacgcgctggacatgctcgaatccaaggaaaacggtatggatgcgggcaagctcgaccgcctgctgttcgatgtgccgcgcgtggccgccgccgcccaaggcgtgcgccatgtggccaccctgcccgatccggtcggcgagatcgtgcgcggatacaatctgtccaacggtctgcgccttacccagacgcgcgtgccgatgggcgtcatcggcatgatttatgaggcccggccgaacgtcactgtggacgtggccagcctgtgccttaaatctggcaatgccgcgctgctgcgaggcggccacgccgccgaacgcactaacgccgccacgttgggcgtcatcgccccggtgcttgaagcccacggtttcgaatctgcgctggtgcaatccgtcgaccagtacgggcgcgccggcgccaccgccatgatggaggcgcgaggccatatcgacgtgctcgtgccgcgaggaggagcgggtctgatccaagccgtcgtgcgcaactccaaagtgccggtcatcgaaaccggtgccggcaacgtgcatatctacatcgacaagtccggtgatctcgccaaggccatcccgatcatcatcaacgccaaaacccagcgcgtgggcgtgtgcaacgccgccgagaagctattggttcataaggatgtcgccgccgaattcctgccgcagatcgccgccgctctggccgaggcgaacgtcgtgctgcaggccgacaccacgtcgtacgacatcatctccggcgcggcgatcgagggccttgacctcaaccacgccaccgaagaggattgggacaccgaatacctggccctcaagatgggcatcaaggtggtgtcggatctgggcgcggccatcgaccacatcaacacgcattccacgggccacaccgaatccatcatcgccgaggattatgcggccatcgaggcattcaccaagcgcatcgactcggccgtggtcatggtcaacgcctccacccgcttcaccgacggcggcgtgttcggctttggtgccgagcttggcatctccacgcagaagatgcacgcacgcggtcccatgggattgcgggagatgaccaccaccaagtggatcggttacggaacaggacaggtgcgcgcatgaacgaggacggcaacatgaacactacggctgacatggcaaacaaggcaagcgaactgcggcccgacatcgacctcaacgatcccaagctcggcctgaagatcgcggccgaacggctcagcatcgtccgctacgtgttccttgtgcagatcgaggacggcatcgcctccgccgcccagcgtgcgtcgctcgaatacgcggacgccgtgctcatcggctggcccgagaccgattcgcccgaagtcgcggacctcgacgatgcccagctcaagatcgtgcgcgaacacatggaactcatggaaggctacatcggcaaatacagccagatggagcacgacggtgaccttgacggcatgaccgacacgctcatccgcatcaccgagcgtgtggccgaggtccgccgcctctaccagccggacttcccgctgcccaccttcgccgagattcgtcgcgtggtccaggacgaatgggatgaagacatgggcaagatcgatcccaaggaagacaatcccaccgccggcgaaatcgaagaggaaaccgaatcagccgatgacgccgccggcgagggcggccaggcatgagtggtgttaccgacagccacaaaacggctgcgtcagttcagtccgaaaaatcagtggaatccgccgagcccgccgaaatcgttgccgtcacccaaggcgaaaccgaacggcgcatgtccgacctgtccgcgccggccggggccagcagccacggcaaaggcagactttccgcacgcggcaactggcatacacgcctgcgcgtcggcatcatgggcggcacgttcgacccgattcacaacggccacttggtcgccgcctccgaagtagcttgggtatacgacctcgatgaggtgattttcgtacccaccggccgacctgtgttcaagctggacaagcacgtcaccaacgccgaagatcggtatctgatgactgtgatcgccaccgcatccaaccccaaattcaccgtctcgcgtgtcgacatcgaccgtccgggcgtcacctacaccatcgacaccctgcgcgatatccgcgcccaacatcccgacgccgagctgttcttcatcaccggcgcagacgccgtggccgaaattatgcagtggaaggacgccgacctcatgtgggacctcgcccacttcgtggccgtcacgcgccccggctactccagtccggacggcgtgaccttgcccgaaggaaaggtcgatacgcttgagatcccggccttggccatctcttcgaccgatgtacgccgccgcgccgaacacgacgagccggtctggtatctggtgcctgacggcgtggtgcaatacatcggcaagcatggtctgtattcatacgaggactgacgattcgtacgaggactagtgtgcatttgtacgagggctggtgaggatgagcgcgaatcagtgcgcgttcatcctcaccagtgcaaaggatgaacggtcaggccagtcccatcttgattttcagtgtcattacgcgagtcgccgccgccgtcacttttgaagcgaaagccggatcggacttcgcccgttcgttgaggccgtccacaattggctttacgtaatccgtctgaccgatgcaggacatgtcgccgcccgcctcgacgagctttactcccaattggcttacatcgtagctgcttaacgcttcggcagacatcgaatccgaaatcaccacgcccgtgtacttcagggcgttgcgaatatgaccgtcgataatcgtagaagaaaacaccgccggattattcgggtcgatggattgatatgtggccaacgacatcatcaccattgcaggatcggtcttggtgatcgcctggtcaaaggcacctgcctcggccccgtccaacgtggtggtcgtatccagaatgccttcggtggtgaagtcggtattgccgcttaccgcgcccaacccaggataatgtttgaccgccgcgccgacctgagcgtctcgcaaaccttcaataacggcgatgccatgttcggcgttgccggccgcatccaatccgaaatcacgatccagcgcgccaatcggagcatttgaggcacgatcgcccaccaccgtgccgagcaccggtgccaaatcgacatttatgccagcagcagctaattgcgaaccccacgtgcctgccgattgacgcaatgcgtcagcggacattgtgccctgctcaacggcactgggcattgtgtcgaaaccggtaccagtcagatgctgcacctgaccaccctcctgatcggtggcgatgatgagacgattgccggccggcgcatatccttggagttgcgcggtcgcggtcttgaccgtatcggcgccggtattccaattgccaatgagaatggccgagccaatgtgctcgtcggcgattgttgaagccagcgaggagggatcggaaccggcgaataacggcaccatcactaactgtcccacacgttcctcaagcgtcatggcggataccgcacgttgggcttgtgcggccgggtcgttcttcttcggggaaggaacgtcggtgcgtggtaacgcacttgtctgggaggtctggggagtggtggtgttgccgtttgatgtggatttggcgaaccatccgacatgccatccgtaggctgccacgccggccaacaccactgccaaagcacatattgtcgccacgattggagtgctcctgtgccgaagttggcgtgtggcgtgtgctgagggacgcagatgttgtggccgttggctgttcataccggcaagcgtagaacggagcgtagaacagaacgctgcctcattctgtgctcagggcataacctacctcccgccctttcgataggcttgagttatgtcttttaacgatcctttctcagtactgttcggcaatggcggcgattcacgacgcaataatgcgaacaatgacgatccgatcatcctcgatgtcgaggccgatgggggcggtccggcccgcaacaccaacgccggcccctccgggtcatcccgccctccacgtggcccggccaatccgcgtatcacccgtaagccagcgtccggtggctcaggatccagccatggcagcaaggttctgatcggcgtggtgctggccttggccatcatcgtcggtctgttcttcggcctgtcccgattcatcaccgatctgatgtggtacggccagctcggcttccagtccgtggtctggacccagctcggggtgaagatcggcctgtgggtggcctacgcgctgctcatggccctgaccggcttcgtttccgcctggctggctatccgggcacgccctgattcggccgacggttccaccattcgcattaacggcgatgtggtcgaggtcggcaaatccgtcagctcgaaaaccgctcgccgcgtggccgtggtgatttcgctgatcgtcggcgtcatcttcggctctcagttcaacgcgaactggagcgagattctgctcatgttcaacgcgcagtcgtttggcaccaccgatccgcagttcggtctggacaacggcttctacgtgttcgtgctgccgggcctgaagctcgtgctcgccgccgtggccatgctgctgggcgtgggccttgtgttttccgtggtcacgcatgtgctgatgggtggtatccgcattaccatgccggttaacggacgcggcctgttctccatcaccaagcgttgccgtcgccagcttggcatctggctgatgctcaacatgttcgcttgggcagcgcgccagatgatcggcgtcttcgaccagctcaccgtgcagggttcacgcatcaccggtgcctcctacaccgccgtacatgccaacatccccgtcacgttcatcatggccgcgctgaccgccatcctcggcgtggtgctgggcatgtggctcatgcgttcccacacgctcgaaggccaggcgtccatcggcgtgcgcgcttccgccgcgctcaaggcttggcgtgtgccggtgacctccattgccgtcgtggtcgtggtgggtcttgtgctcaccgtggcatggccggtgctgttgcagcgcttccgcgtcaacccgaacgcacaggagatggaatccacctacattcagcgcaatatcgacgccacccgcgccgcctacggtcttgacaagctcaagaccgagcaatacaaggtaaccgacaagggcgagcagggcgctctggccaaggagggcgacaccaccgcgcagattcgtctgctcgacccgcaggtcgtcagccccacattcaagcagctgcagcagtccaagcagtactacaccttcgccgacactttggcagtcgacaagtacgagatcgacggcgtttcccaagacaccgtgattgccgcccgcgagcttgacctggccggcaacgacaaccgcaattgggtcaatgaccacaccgtgtacacccacggctacggcgtggtggccgcttacggtaacaaggtgaccgccgacggccagcctgaattcttcgaatccggcatccccactcagggcaagctcactgaatccgaaaagtatgagcctcgcatctacttctcgccgaacaccaccgaatactcgatcgtcggcgcaccggagggcacgcaggcttgggagttcgactacccgaccggttcggaaggcgccctgaccacgttcaagggcgacggcggcccctcggttggcaacctgttctcccgtattctctacgcaatccgcttcggctccgatcagattctcttctccgaccgtgtgaccagcgaatcgcagattctttacgatcgttcccccaaggagcgcgtggccaaggtggcgccgtacctgacgcttgacggccgtgtgtatccggccgtggtcgatggccgcgtcaagtggatcgtagacggctacaccacctctgatgcctacccatactcgcagatgaccgacctcggctccgccaccaaggattccaccaccgtctcttcctcaacggtctcatccttgggctcgcagaaggccaactacatccgcaactcggtcaaggccaccgtggacgcctacgacggttccgtggatctgtacgtatgggatcaatccgacccggtaatcaaggcatgggagaagatcttccccggccagtaccaccagctctccgatatctccggcgacctgatgagccacatgcgctacccggaaagcctgttcaaggtgcagcgcgagctgctctccaagtaccacgtgacctccgccaaccagtactactccggcgaggacttctggcagacgccggtcgacccgaccgaatcccagtcccagcaggaccaggacatcctgcagccgccgtactacctgaccttgcagaccggtggcaccaaggaaccggtgttctcgctgacctccacctacattccggctggccagtccacccgtgagatcctcaccggcttcctgtcggtcgactcggatgccggcaatgagaagggcaagataggctcaaactacggcaccatccgattgcaggagctgcccaaggattcgaacgtaccgggccccggccaggcgcagaacaacttcaacgccaacgccgacgtgtccaaggaactgaacctgctgcaatccggcgacacgcaagtggtgcgcggcaacctgctcaccctgccgctcggtggcggactggtgtacgtgcagcccgtgtacgtcaagtcttcgggtgcgacttcattcccgctgctcaagaagacactggtcgcgttcggtgatcaggtaggattcgcggatacgttggatgaggccttggatcaggtgttcggtggtgattccggcgcggccgcaggcgatgccgagaacgtgtccggtgacggatcgtctggtgaccagtcgtccggcatatccggtgaccaatctggttccgataccaatggtggccagtccggcaccacggacggcaagtcggattccggctcgtcttccgaccgtagccccgaactccagcaggtgctgaacgatgccgcccaagccatgaaggacagccagtccgccatgaagaacggcgactggaccgcctacggcaaggcgcagaaggagcttgaagacgccctcaacaaggccatcgagctcgacaagtagttccgacaggaattggctcccctcagggtgaggggagccatcgccgaaggcgactgaagggagtcggttacctcaactgacatagcccgtccttatcataaggacgggctatttgcatattcaaaggaacctcatgccatacaccttccgtccggccgtcgaatccgacatccaagccatcaccgacatctacaatgcctcagtgatggccggcggtgcgaccgccgacctcaccccacgcaccctcgaccaacgccgcgcctgggtcgaatcccatacgccgccctacggcgtttttgttgtggaatcggaagacggttcaatcatcggcttcggtgcgctctccgtgttctatgaccgcgcgggatatgacggtgtcaccgatttggcctattacatcgatccggcatggcaaggcaggggagtaggcacgttcatgcttgacaggctgctcaccgaggcgcgggcccgccacatgcgcaaggcctgcggcatcattttcgccgataacgccggctccattgccctcatgcaccgcttcggcttcacccaattcggactcatgcccgccgctgccaccgactccaccggcaccatgcgggacatgtcctactggtatttggacctgtagccttgcagtaagtcatttcagtcaagaaaagtgtgaggatgccggagcaaacgagcttgacggcggcgttgagtacaatcttgacggttggatccggccgggcatgggccagtgcgcgaggcgaacgcgcgcatgacgtacggaacgtacagaacgtgcatacgggaataaaggaagacggacgaggagcggattatggcatcggatttctggctgattgcgggactgggcaaccccggcaaaaaatatgaggacacgcggcacaacatgggcttcatggccgccgacgtgctcgccgaacgttggacggtgaacttcgccgatcacaagggcttggccatgctcggtaaaagcgtgatgaacctggacggccgcaccgtcaagttctttctggccaagccgctgacttatatgaatgattccggcaatgcggtggcttccattagcgcctattaccagatcgagcccgaccatattgtggtgattcacgatgacatggacttggaattcggccgtatcaaggtcaaggcaggcggctccgcaggcggccacaacggcatcaagtcgattgaccgttccctcggcacgccgaaatacgcgcgtgtgcgcatgggcgtcggtcactccaagcgcggtgcgaacgcgcatgacaacacggtgaactgggtgctgggcggattcggtccggaccagcgcaagcagctgcccgaattcctggctgacggcgccgacgccgccgaggacatcatcttccacggtcttgccaagacccaggagaagttcaatggccggtgaggcgacgcacccggacctgatcaacggctcactggcaggcatcctgtctgagctggaacaggacaagaccttcctgaagctcgccgccggcgacatcgaggcttcggacgacgtcgacaactccgtcctggccggcatccccgaaggtttgcgcccggctttggccgccgccatcgggcagggtgtggccggcaaacccggcaagccggtcgtgctggtcgtggcctccggccgcgaagccgaagagaccgtgggctcgctgcgctcctggtatgatggcgacccgaacgacatcgcccagctcgaagcctgggaaaccctgccgcacgagcgtctgagcccgcgcgcggacaccgtggccagccgcatggccgtgttccgcagactcaagcatccgagcgataccgattcgatgttcggcccgattcgcattctcgtcatgccgatccgctcgctcatccagccagtcgtccaaggactgggcgatgtcgagccgctcgtgttcaccgtgggggaggacctgcccctcgacgaagccgccaaacgtctgatcgaaaacgcctacacgcgcgtggacctggtcatggaccgtggcgagttcgcggtgcgcggaggcattcttgacgtattcccgcccaccgcaccgcacccggtgcgtatcgaattcttcggcgacgaaattgacaccatcaaggaattccacgcctccgaccagcgtacctacggcgacggtctcaagaccatctgggccaccgcatgccgtgaactgcagctgaccgacgccgtgcgcacccgcgccaaagccttggtcggttcgattcccaatgctgaggacatgctcgaatccatcgccaacgccattccggtcgaaggcatggaatccctgatgcccgcactcgtggaccatctggaaccggtgggctccatgcttcccaagcacgccgtgatcctcctgagcgacccggagaaactacgccgctccgccgaagacttggcaaaaaccgcgaacgagttcctggccgcaagctggcatgtggccgcctccggccacggcgccggcgcgcccatcagcttcgacgaagccagcttcctcgactatgcggaaaccatcagctccctcgaatactccgaacatccggtgattcgcctcaccagtttcggcgtggacaccacgttgaccggccatgtgcagctcgacgcccagaacccggccgaattccgaggggatgaggccaaggcctcccaaggcattgaaggcctgctcgatgccggcttccacgtcaccatcaccgccgctgcggccggcaccttggccaggctcaagcgtgcgatcaacactaccggcatcgccaatttcgacgtcatccgctctcaggccatcgacggcttcgtggacaaagccgccaaaatcgctctgctcaccgaacgcgacctgaccggccgcacttcagccgtggccgtggccaaaacgccgaaacgccggcgcaaggccatcgacttggtggagctcaaaaaaggcgattacgtggtgcacgagcagcacggcattggccggttcatcgaaatgcgtcagcgcaccatcggcaccggcgccaacaaaaccactcgcgaatacctggtcatcgaatatgcgccttccaagcgcggcgccccggcggacaaactgttcatccccaccgaccagctcgaccaggtcagcaaatacatcggcgccgaagcccccaagctcaacaagctcggcggctccgactgggcggccaccaaggccaaggcccgcaagcacgtccacgagatcgccgacgacctgatcaagctgtactccgcccgccagcgcgccaagggcttcgcgttcagcccggacaccccatggcagaaagagctggaagacgccttcccctatcaggaaaccgccgaccagctcaccaccatcgacgaagttaaatccgacatggaaaagcccgtgccgatggaccgcctcatctgcggcgacgtgggcttcggcaaaaccgaaatcgcactgcgtgccgccttcaaggccgtgcaggacggcaagcaggtggccgtgctcgtgcccaccacgctgcttgtccagcagcattacgagacgttcagcgaacgattcgagggtttcccggtcaatgtggcggccatgagccgattccagaccaccaaagagatcaacgagaccatcgaggggctggaaaccggcacggtggacgtggtcatcggcacgcacaagctgctgaacccgaaaatcaagttcaaggatctgggactcgtcatcatcgatgaggagcagcgtttcggcgtggaacacaaggagacgctgaaagccctgcgcaccaacgtggacgtgctgtccctgtctgccacgcctatcccgcgcacgctggaaatggccgtgaccggcattcgcgagatgtccacgctcgccaccccgcccgaagaccggttgccggtgctgacctatgtgggcgcctacgaggatgcgcaggtcaccgcagccgtacgccgcgaactgctgcgaggcggccaggtgttctatgtccacaatcgtgtgcaggacatctcgtccatcgccgacaagatccacacgctggtgcccgaggcgcacgtcggcatcgcccacggcaagatgggggagaagcagctcgaccagatcatccgcgacttctggcatcgcgacatcgacgtgctcgtgtgtaccacaatcatcgagaccggtcttgatatctccaatgcgaacacgctgatcgtcgaccatgccgaccgtttcggcttgagccagctccatcagctgcgtggccgcgtcggtcgcggccgcgagcgcgcgtacgcctacttcctgtacgacccgtccaagccgatgaccgagcagtcccatgaccggctcgccaccatcgcgcagaacacggcgctcggctccggtttcgatgtggccatgaaggacttggaattgcgcggcaccggtaaccttctgggcgacgagcagtccggccatatcgagggcgtgggcttcgacctgtacgtacgcatggtgtccgaagccgtggaaaagtacaaggagcccgaagagaacgtcgagccggtggccgtgtccatcgacctgcccatcgaagcgtcgattccgatcgagtacatcgattcggacaagctgcgtctggaagcgtaccgcaagctcgcctccgcccgcaacgaggccgatctgaaggatttggaagaggaacttactgaccgttacggcaagccgccggtcgaattcgagaccttgttcgatgtggcccgtctgaagttcaaggcccgcaagctcggcatttcggagattctcgcgcaatccaaccgcgtgcgcatcggtcgcatcgacccgcccgaatccatccagatgcgtatgggccgtatttacaaaggcacccaataccgtccggtcgcccaccagctcatcgtccccaccccgttcaccggctccctaggccaaggccccatgagctccgaccaggtagtcctctggaccaaccagttacttgatgatttggcatggaccccgtcgtcaagcaaacggcagagccgtttgtagacggggtgcgaggcgacagtcgagccagctatggctcaccgggcaacatccggtgagccatattcatattcatgccgtcgtttgtgacgatgattcgctacagacggaatcgttccgactgtccagcgagcgagattaagtgactgctatgagcgaaacgactacgaaccgcacgaaccagagcgcgaccacggcgacacttgccggctatgagattccccgcctcggcataggcacgatggcgctcgccatcgaggggcgcccctccaaccgtgatcaggcaatcgagaccatccatgccgcgctcgatgccggagtccgttatttggacacggcttggtcttattatctgcccagcgcacccggaaccggcgagccggaggatatgggctatggcgaatatctggtccgcgatgctctgcactcgtggcatgggccgagagaacaggtgctcgtggccaccaaaaccggttggctgcgtacgcttgacggcagcggcaactacggctggcaggccgatgcccgacccgaaaccatgatcgccaatgccaaggaatccgccagccgcctcggtgtcgacacgctcgatttgctctactcgcactgcaatgatccgcaggtgccgtacgaagaccagatgggcgcactcaagcagctcgtggacgaaggtgtggccaaagctgtcggcatctccagaatcgccaacgcggacatcgaaaccgcccgcaatattttgggcgatcgtcttgtggccgtccagaaccagttctccccggtccaccgcgaccccgaacacacgttggaaacctgcgaaaagctcggtttggcttttgtctgctggtcgccactcggcggattcctcgacccgttcaacgagcatctgttcgaccggttccgcgaagtcgccaagattcacgactgctcctaccagcgcgtcacgctcgcgtgggaacttgcgcaataccaatatctgttcacgattccctcggccagaaacccgcaggagattcaggactcgttcaaagccggcgaactgaaattgtccgacagtgagatcggctacctcaatggcaaggacgttgactgagcgatttcgtccgtactgccttgcaatcaggcggcacactggcattgtgagcgctaacgctaaattttgggcgtgttgttcacaacgtccacaaatcgcactactcttaagaatgtcattcaagatacacaaccgttttaaggagtagttgtggcagtaattgaaagcgtgtacgcgcgtcagattctcgattcccgcggcaacccgaccgttcaggtcgttctggacaccgaagacggcgcccagggcctgggcctggtcccgtccggcgcctccaccggtgaggccgaggcttgggagcgtcgcgatggcgacaagtccgtctacggcggcaagggtgttcttaacgcggtcaaggccgtgaacgaggtcatcgctccgaaggtcatcggcatggacgctgctgaccagcgcgctctggacgacctgatgatcgagctcgacggcaccccgaacaagggcaagctgggcgccaacgccatcctgggcgtctccctggctgctctgtacgcttccgccgagtccgccggcctgccgctgtaccgctacatcggcggcaccaacggccacatcctgccggtcccgaacatgaacatcatgaacggtggcgctcacgctgacttcgccaccgacattcaggagtacatgatctccccgtacggcttcgacacctactccgaggctctgcgcgctggcgttgaggtctaccacaccctgaagaacgtcctgaagaaggaaggcctgaacaccggcctcggcgacgagggcggcttcgccccgaagatgaagtccaacgaggactccctcaagtacatcatggacgccatctccgccgccggctacgagcctggcaagcagatcggcatctgcctggatgtcgcctcctccgagttctacaacaaggagaccggcaagtaccgcttcgacggtgaggagcgcgactccgcctacatgctcgactactacgagaacctcatcaacgagtacccgatcgtctccatcgaggacccgttcaacgaggaaggctgggaagactgggctgccatcaccgctcgcctcggcgatcgtctgcagttcgtcggcgacgacctgctggtcaccaacccggctcgtctgcagaaggccatcgacctcggcgccgccaactccctgctggtcaagctgaaccagatcggttccgtcaccgagaccctcgacgccatcgagctggccaccgccaacggctacacttccatggtttcccaccgctccggcgagaccccggacaccaccatctccgacctggctgttgctaagaacacccgccagatcaagaccggtgccccggcccgtggcgagcgcgttgccaagtacaaccgcctgctcgagatcgaggaggagctcggctccaccgctcagtacgccggctacagcgctttcaaggcctgcaagaagtacctggccaagtgagctgaaacgcccgtaaaggcgtgagtttccactgaagctcgatacccgtcgtgttcgtcaagtcgaatgcggcgggtattttcatgtgacatgagcaagtcgtcccgtaccggcaaacctggcaaaaccggcaaagcacaagtcaggaaaaaagggtcggcggggcccatagcgttcttcgtctccctgttcgtcatcgcactcggcaccatccagctggtctccaccttccacacttatgccctgaacctggccgagctcaatggcctcaagcgtgaggaggcctcgctgatcgcccaaaagcaggagttggagaacgacatcaagcgttgggatgacaaggcctacatcaccgcccaagcccgtgaacgcctcggcttcgtattccccggcgaacaggccgtgcgtgtgctgcatcccgaagccgtgaccggctccgatagcgaatcccagaaaacggaagattccagtagcagcaacaaaaaagtcctgccatggtacagcgaactgtcttactcgctcaaaaaggccgatgagcctgtgaacgatagcgagtccggcaaatccgatacttccggttcctctgactcgtcatccaacgactcatccaagcagtccgataagtcagaccagaacaccccatccgatcagaacacccaacagaacacaggggagggaacccaacagtgaccatcgatatcgccgccaaggccaaggcccttgtcgacaccatgcttgccgagcccgccaacgaccatgacatcgacctggtgcagcgtcagctcggccgatacccgcgcggcatggtcgccgtgggggcacgatgcgtctgcggtaggccacttgccgtaatcacccgcccggtgttgcccggcggaatccctttccccaccacgtgctatctgaccggtccggaagccgtcaaggctgcctcccatgtcgaggccgccggcgtgatgcagcaatacaacgatatgctggccgctgatgaggagctcaaggccgcatatgagcaggcccataatctgtatctggcattccgccacgaactggcaggacgtcttggcgacagtgaggagcatattgaaggcacttcggccggcggcatgccagtgcgcgtcaagtgcctgcacgccctgctggcccaatccctggtcatgggaccgggtgccaaccccattggcgatctggtgctggaacgtgtcaaagacgagttcgatccgaccgtctgccgttgcacactggacgattgatcaacagatgagccaccgcgaacagcccattcatacgcactaagggatacgaggagaaggcaatgagcaaggaatccgtaaccgtggccggcattgattgcggcacgaactccattcgactgaagatcgcacgtgtcgatgccgatggcatgcatgaggtggtgccgcgcatcctgcgtgtgatccgccttggtcaggatgtggacaagacccatcgttttgccgacgaagcgttggaacgcgcctatgtggccgctcgggaattcgccggtgtgattgccgagcatcccatcgacggcctgcgtttcgttgccacctccgccactcgtgacgcggaaaaccgtgaggagttcgaggatgagatcgaacgtatcctcggcgtgcgccccgaagtcattcccggcactgaagaagccgacctgagcttcctcggcgccacttccgtggtcaatcgcgacgatctgcccgccccctatctggtggttgacctcggcggcgggtccaccgagctggtcatcggtggcgacggcgtcagtgcgcccactacccaggttcagggcgcgttttccatgaacatcggttccgtgcgcatgaccgaacgtcatctgaccaacgatccgccgacccagacacagatcgatgaggccgttgcggacgtcgatgaacatatcgacgaggccttccgcaccgtggacgcaggcaaggcccgtaccatcatcggcgtgtccggcacggtgaccacgatgaccgccttggccatgggattgaaggaatacgatcacaccgtggtcgacgggcaccggttgagccttgaagacgcctatgccgtggacgacaagttccttaggatgacgcgcgccgagcgccgcgaatacaagaccatccaccccggccgtatcgatgtggtcggcggcggcgctgtggtgtggagccgtgtgctggcgcgtgtcagcgaagccgccaaggccgatcatggtgaagccatcgattcgttcgtcgccagcgaacacgggctgctggacggcattgtgctcgattatggtcgccggttgctggctcaatagcgtaagtggtaagtgcctccagtgggctgagtcgttaagcaaacagcccgctgggctgtttgctttatatgcgacgccggcgacgctatcgctaccggctgctacaaacagcccactgggctgtttgtaggcgaagggagcggctatgccgcgacggctgcacgaagtgcagcaacccgcaagcaacgctcagggcaggagatagcttataatagaaaagttggcctccgtggcgaaatggtatacgcagtcgacttaaaatcgatcgcttcggcttgtgggttcgagtcccaccggaggcaccttgaaatcggcctgtggccgatgcgttttttgtggctgtgccgcggtctctccccagtcggcttcgccgacggcccccctcgtcagaggaggctcgcagcttactatgtggggagcttataaggccgaaacaaaaggccgttaggctatgtggcgttgtgacgttgtacctgatgaaacgaggaatccacatggcttcacgctggaccgatgtcgaacgagtcgaacaaggcgccctgcccaccatgcttgcccaagccgtcattgcgggcacggcgctcaccgttggtgccatcgcctgctcgggattctatctgtctatgatcggcaatgtggccgcactcctgccatgggcgactatcgtgatactgattgccgtggcgttcacctacatcgtcggcttcgccctgttgtggtgtgccgaagccttgaccctgcgtgccaacgacaaactcaagccatggctgtacggcgtcgtcggattaatcggatacggcgtgtggggcatgttcgtgatgagcacgatgatgaacacgttgaaccagccgctgaacggcgtggtgttgtcgaacagcgatgtgatggccctgaccgtcaactacgcggtgttcggcttcatcgccttcctgttggcacaggtgtacgcgcccaaaatcgccaccaagaagggactgaccatcgggctgatggtggtgcagatcgtattggccatcatcggcatcatcgtactggttatgatgttctccgcactgtctcactgactgacttatcgatcaccggcacgacgcgcgcggccatcaccgcacaaggcgaaagcgattccgggcgctaggctggaatacgatatcgtgatggcgtgacgcctggcaacaccggcatgccgaaccagcaggggagaaggagccaaatgttcagtgtgcttgacatgttcaccatcggcgtcggaccttcatcctcgcacactgtaggcccgatggtcgcggcacatgccttcgcctcctcgttgcaggccgaccatttggtcgatcgcaccgcacgtgtcaaaatcacgctttatggttctctggcgctgaccggtctcggccacggcaccgatcgcgccgcaatggccgggctcgaaggcaatctgccggccaccgtggataccgaccacatgatgcacatccgcgagacctgcgcgttggacgatactctgaaccttgccggcctcagacgcatccatttcgactacgaccgcgacgtggtgttcgaacaatggaagcgcatggccacgcaccccaatggcatgcgattccaggctttcgacgccgccgcaagcttggtcgacgaacaggtctggtattccatcggcggcggattcgtgcgcaaaggcgctcccgaagacccgatgatcggcattcatgaacgccctccggaaggcacctcctttgccgacgcggacgaatcatcatccactgatttcggcgtcgaggcaccctacccgttctcgtcatgcaccgaactggtgtcgttgtgccgggaacatcatctcagcatcgccgaacttgtatgggccaacgaaaccgcttcacgctcgggcgcccaggtccgatccgatattgataccatctggcgtgttatgcgcgcctgtgtggaccacggatgcacctcggcggaacccacattgcccggtggccttgacgtaccccgccgcgcgccgaaaatgtatcggcgtctcgccttgaattccgatgtgctgcgccgcgacaaccggcgcaaagacgccgtgctcgaatcctcggacgccgcatgggtggatctcttcgccttggccgtttctgaggagaatgccggaggcgggcgcatcgtaaccgctccgaccaacggttccgccggcatcattcccgccgtgcttcactattactggcatttcgtggacaacgccaatgaacagggcgtggtcacgtttctgctgaccgccggtgccatcggatacctgttcaaacgcaacgcctcaatttccggtgcggaagtcggttgccagggcgaagtcggctcggcctgttcgatggcggcggccggacttgccgcagtcatgggcggcacgccggaacaggtggagaatgctgctgagatcggcatcgaacacaacttgggcctgacttgcgatccggtgggcggactggtgcagattccatgcatcgagcgcaatgccatggccgccaacaccgccatcaacgccgtgcgtatggccatgctcggcgacggctcacatatcgtgacccttgatcaggccatcgaaaccatgaagcagaccggggaagacatgatggccaaatacaaggagacctccaagggcgggcttgccgtcaatgtcgtcgaatgctgattgacatgtctggtattcaccagcatgatgaccggaattgacgtatacggccggcgtgtcgtatcgcacagggatgaaggactaccgccgattcgccgatggtgctaaggtagggcgcattgtgtctttgaaggaggactaatggcagatcagatgcctcaggtgaacgccgaatacggcaccacgcccgttatcgagttcccgacgcccgaagccccgaagggcctcaaggttgtggagctgaccgagggcgacggtcctatcgtgcgtcgcggcgacaccgtcaccgtgaactatcacggcgtggtgtggggtaaggacaccccattcgactccagcttcgaccgtcatcagcccgccagcttcggcatcggcgtgggacaggtcatcaagggctgggaccagaccgtgccgggccataacgtgggttcgcgtctggtggtttccattccgccggaatatggctacggttcccgcggcatcccgcaggccggcatcggcggcgaggacacgctggtgttcgtcatcgacatcatttccacccgctgaccataggtcagcacatgacgaacgccggggtcatagccggcgttttgtcataaataacgaaaattgtttcagcatcgacaacggttcaggaggacgatatggctgaggacaaggtctacctgctgacgcaggaagcatacaacaagatgaaggaagagctcgcccatcgtgaaggcgagctgcgtgaggaaatcgcgcacaagatcgccgtggcgcgtgccgagggcgacttgtccgagaacggcggctaccaggccgcccgtgaggcgcagagcaagaacgagggccgcatcaccgagctcaccgtcaagctgcgcgattccaagatcatcgagaatgctccggaaggcaccgtgggcgagggctctgtggtgaccatcgagctcaacggcaacgagatgacctacgtgctcggcagccgtgacatcgtggccggcaccgactacgacatcatgaccccggattccccgattggcaaggccatcgagggtgccaaggtgggcgacgtcgtttcctacaccgcaccgaacggccgcgagctgtccgtgacggtcaaggccgccaagccgctggcctgagttaagtgactagtatgcccccgtaggcgggggcatacttatatgtcgtagcgtttattgccacagcgagacgatcaccatgtagatggccaccatatggcaggcatatccggccaccgttccgcagtggaaaatctcatggaagccgaagacgcgaggccaagggtcgggcttgcgcaaggcgtagacgatggcgccgaggatgtagcaggcaccgccggcacacagcagcaccaccacggctggccccgcatacggcgaattccagaacatcaccatataagccaggccgtagatgccgaagatgatgtacaccaccgtatacagccagcgtggtgcattgatccagatcacatgaatcacgatggcgatggccgtgcacgcccacatcgatatgatgatcacattgcgccagaacggttccagcgcaaacgaaaccggggtatacgtgccggcaatgagcaggaagatgttgacatgatcgatacgccgcagcacatcggtgacgcgcgggctccaatcgcccagatggtagcaggccgaattggtgaacagaatcagcgacgctgtcatgaacacggcacacgcccacttcagactcgcgccatgtgccaggcatataagcacgatgcctgccgccaatgacaggggagcggcaatcgcgtgaatccagccgcgcatcaacggctttggtcgtccgtgcacgtcgagacgaatcttgcgttccacttccgcaggggcaatgccctcgattttcagcgcacggtgctccgctttggcgagcttgtgccgggccttctcctcggctttggctcgaatggcctcggccttgaactgggccttggcccgtacggcatcagccttggcctgcaacgcctgttcgcgcgcctcgatagccgcctgacgcttggatgcgatggtggcatcctctgcaatcgtcgcgctgttatgagcgtcgtgatgcatcgtcttttccgcgtcgtcggttgttgatgccatggtgatacccccgtttcacgagttgacgatacgcttcttacgctgccgtaacctacgttagcgtaacttttatgcttgtcaataccgactcacacgaacactatcacccaatggtggcgatactatggaatccgaagatgagaacgtcacagcaataaggggttcggtgatggtgtattgcacggagtgtgggtttgccaacgagcaaggaaatgccttctgttcgcagtgcggaagcccattggagcagcccgaggccaatccggcggcccctgcttctcctgaacctcccgccgggcgtcctggcgtcgatcacaccaaagcgcaggcaaacgcgatggtgggttccatggacacagcaatgccggcaatatggtggcggcttcggatatcaaactgtacgtgatgcttgccgtgtacgataaacaacatgccggcaccttgaccacgggcgggaagccgtgcaacgcgattggcgcggtattgaagatgcgatgtcgtcatagtcgtcgtacttgcccgtgtggcttgccgcgatggcggcgacgtgtctgcgtatgataggggcatggctgatttttcacacatccttgcaacgcgccccgacttcgacgacgaggaccgcgagtggctgcatcatctcgttgccgattggcaggtgatcgccgatttgagtttcgccgatctgctgctgctggtacaggatggcgatggcaaatacgtggtggccgagcaatgccgtccatccaccgttatgacgctgcgggcggaagacgtggtgggaaacgtcatgccggacgacatggtcggcgaattggacgccgccatgctctccagcgtggtgttccgctccacggtattgagaaccgtgggcaaggcgaccgtctgcaacgtgtacgcgccggttcggcacaatggcaagaccttgggcttggtcgtgcgtgagaccaatatggccacacgagaatccaacggccgatatgagtcggaaagcatcaacgccggcaagcatctgtacgagatgattccgcgaggccaattcccctacaaggattcggtgatgagccaacgccatatcgctcgcgtggcggacggcttcatcatcctgaccatggacggcgtggttcgatacgcagccccgaacgccatcagctgctttaggcgtctcggtctgctgaccaccatgcctggccattacctcagcgaactcggcacacagctattgaaggagaacgaccctgttccggaaaccctgccgttggtgttgacaggcaaagccgcggtcgactccgaactcaacgccaaccgttccgccgtctcgatgcgctcgttgcccttgtatgacaacaacggccgtatcggagcgattctgctatgccgtgacgtcaccgagctgcgccgtcgtgagcaggagctgcagaccaaggacgctacgatttccgagattcaccatcgtgtcaagaacaacctgcaggccgtctccgcattgctgaggcttcaggctcgtaagaccaagtcggatgaggtcaagaaggaattgcaggaggcgcaacgccgcgtgcagaccattgccatggtgcatgagggattgagccagaccgccgacgaggtcgtcgacttcgacaaggtgatcgccaacctgctgcgcatggccgtggacctagccacgatgaaagaccagcacatcgacatcaactacatgggcaagttcggcatgatgcccgctcaggatgccacgccgctgtccctcgtgctgaccgagctcatcaccaattcggtggagcatgggttcgaaggccgcaaggatggccatatcacgatttccgtgggccgctccggcccgaacctcaatgtggtggtcgaggatgacggttccggtctcggctccgaagaacaggggggattggctcgttcttccggttccggtttgggcacgcagatcatcaacacctttgtgaccaatgatttcggtggttccgtgcattgggagccgcgccgcgaaggcggcacccgcgtggtgcttgatatgaagctcagggccgctcaggacgagtgatgcgaagcccgaaatgaggaaaccctcccgagtgggagggtttcctagtatgacgaagaaataatcaaaacatcagatttgcatctgcatggcctgagaacggcgggcacgcatggcgcggcgcttcagcgcacgacgctcgtcttcgctcaagccgccccacacgccgtaatcctgattggtgtccagtgcgcacttcaggcatgcgtcaatcaccttgcaggtgcggcacacggccttggcctcctcaatctgctgataggctgcaccggtgttgcccaccgggaagaagagttccggatccttgtcacgacatgcggccttggctcgccaatcaaaagcgctgctcattgcttgcctcccttaaaagccccgtggctggtgttgttccttaagtccagtaccaaggtaaccacgaaccgtggtgattttcaagaggttttgccgagaaaaaaccgaagttttcacgaagcgcactgcaccagacatgccgatgtgccctcgatgagcacggcccggcccgcgttgtcggcatcgatatgattcatcatatccaataggcgagcggggactccggccataaggtcagacgttcgttccccgcacgggaacacgattctggtattgcaatgctctggtatacgtatcgggcgaatcgtgctgacggcgaataccacgctgacggactcatcggccaacgcatgtgtgaaagacagcgcctgctcgtcggtgcggaatgggtcgaacaactcatcggcgtcgtcgacgaaccacacgatatgcggaggcggtggtgcatccgagctggcatacggcgtgcgacggccgccatgaagccattgcgagctccatacccgacgatgcagggaactgacacgtaccgccaagccatcagccatgctggcgtgtcgagccaatgttttcagcaatgtggttttgccgcgcccctgcgggccgatgacaccgatattgccgccggtgagggataccgtcgcctctcgcaggttgatgccatcgtcggcaagtccaaatcgaatgcgttgcggtgcgtggtcggccacagtccggtcttttacgtgccgggggagtggcgcggtaaacagggacggctgcggcgggctcccgacgaaccgcgatgcgaacgcgatctggcggcataccgcatcgatatcgcgtgccgttgcacagcggaatgccgtcacctgttcagaatcgttgcagaacgccgcaccgggcattgccggactgaggtcggcggcacgaccatcaccaagcagctcgcatgattgcagacggtcccgaacccgtaaacaaatgctgacggacatattcgccttcatatcggcactgacctgacccatgggattctgcgtacaggcgatcagatacatgcccagtgacctgccgagcgaggcaatacgcaccagacgattcacataatccgggagctggtccttcagggcatggaattcgtcaatgaccacgatcaggcgcggtggtggattgaccatatcgcggatatcggaagcatggacagcggcggacagctgttcacggcgtgtcagttcggcttccagcgcacgcaacgcgcgtacggcatgcgccagatccagatcgcatacgctgcccacggtatgcggcaaccgttcgagtttgcggaacgcggaaccgcctttgaaatccaagaacacgaaattcagatgctcaggcccgttcatcgaggcgagcgccagacaccagctttgcagcaacacggattttccggaaccagtggtgccggccaccagagcatgcggcccctgacggttcagatcgagcatcagcggctcgcttccggtcatgccgatcggcaccgcaaggtcaaggggttcaagccagcggcccacaatggcgcgccatggcaggcgtgcgaagtgcagcagcgattctatcggctgcgacggcgcatgacggaggtctgcggcgcggtcatcggcgtcgcccgtgataccgacatcgatcgttgcctgttgcggatcgggagccttctccgggcctggaggcgaggggagcgtcagcagcagggacacgagacaggcgaatatgcccggtgcgatcatggcggcgaacagccattgcccgtgcaacagcagtatgaccatcatcaatgcctgcgcgatcatcgggcacgccgcggcaaacatggtcaggcgggcgcgcaatggcggcgcgcccaaacggtgcttcgcccgggatacggcggatgccgtatggacggaatgtcgcttcgaatcgttctgctgtgatgtcatgcttccagcgtgggggaacgcatgccgaaagcgcaaaccgaatcaaggtatgtggttctagcttgccgagttatccacatgacattttgcccgtgcatgattggcggtgtaggcaacggtgacgatcatgcgccgatgatgaagccgatgggctccgggaaagcgtcggtcagccttccgccagattgcccacggtgccggccttatgcgtgccgtcggcaagttgattgaacagttcggtgttcttggcgtcgtcaagcagcaccgaggaaccaacgccatcaacgtaataatcggggtcggaccagtacacgctgccggagatgccattcgagccggtggcgcttttgaacgccaacgccatggtgagcaacgtgtaagggtcggtcttctcgtccacggtgagtgcgctcatcgcggcattggacactgccacgattttggacggattggtcagggtctcactgctggaagccttcttgacgatggccgagatgacctgtcgctggcgttcgttgcgcccgaagtctcctcgcgcgtcggcatatcgcatacgagagaaggacaatgcggtggaaccatccgccgtatggcatcccgccttccagttcagtccggaataggaatcctgaacatcctcgtcatagcacagttcgataccgcccaaggcgttcaccacgttctgcagaccgccgaacttgatctgtgccacatgatcgattttctggccggtgatctgctcgacgttgcttaccaaagccttcttgcccgcaatcagcgccaccgcattgattttcatgtactggttatcgacgttcatgagcgaatcgcggggaatggaaaccaacgaactcggcccgcttttgggcttgatcagcaccagaatcgtatcggtcctgaagccagagatattgtctacgccgccgtaatcggtggaaccgtcacgctcatcggagccaagaatcagccaagtcgaggccggcgtgttgggggtgtcggtcagccagtcgctccgattcagtttgctgtccacccattgccaggcaccgaaaacggaaagaatcaacgccgccaccagtaccgcgattgcgcatagggtgatgcgtaaggctcgcggacggcgtgccgttaccgttttcgccgttgccgccgccggccggccaagatggctgaacttcgtggacacgtttgctgctggcgatgagggccgggaaaccggcatatccgacggattgcgcacggcgttgcgggatgagccggaagacatccgcgctcgcgacggcggaatgctgcgcggtgcggcggcatccggagccgtgctgcgagtggcgcgtccggttttcggagaaaaactgggcggagtccgcctgccgttgtccgcgacgttggcgcttgccgtggcgttggcgttcagttgaggctcttcgatgtcatttcccgtgacggacggacgggccgatggagcttgacctgactggcgcgaggttcgggcgggggcgaaggagcgtggcacctgcccggaaggccgggtgcgtcgatttcctgcaggaatgaagcttggcgggttgatatgcggatccgccccacctgattcctgcgtcataacccctcctgaaactgtcgattgtctgaatgacactttgacacagcatccgccgggtgttcctgcgctatggtgttcctgcgcaggaacggcacaatatcatgggcaacggcgtcagggcatcgcgttcacgccatagcacacagttccataaaaatgatgtaatgacacgagaaagaatttgacaaaaccgaaattgcatgtgtgtaatttagtccgtatgaaaagctcaataggcaaggagaatcgcatgtggggtgtggtcgacgattcagccgaagagccatggcacgaattgtggggactattccgacctgatggcgatgtatcttggcagcacaaggcgttgtgcgcgcaaaccgatccggaggcgttcttcccggaaaaggggggctcgacccgtgatgccaaacgtgtgtgcgcaaaatgcgaagtgcgtgagcaatgcctgaaatgggccatcgaccatgatgagcgattcggtatttggggtggcatgagcgagcgcgaacgccgtcgatataagcgagagcaccgggagcgggcgtagctccacacacccccttcaagtctggtgcgtacactgggagtttatgagtccgacaggtaatagcgatattcatgaggcgttggccgacgccatgtcttctcgaccatatacgcataggcaggatgtggataccggcattacggctgtgatcaccgttgaggaggatatgcgtttcctccggtctacattgcgttcggtattgacgcagaatgttcttccgggagtcgtcatcatcgccgacgcgactgggcgcaccagttcgaggataaccacctcgttcgaggtcatcccctcgccatcggggccggtgatggaggtgccgcagtccaagcatgtgaccattcacatcgtctcggccaagggcgcacgctccttcggcgatgcggtcagccgggcattggatcgtgccgatctggatgacgctccccgcgcattgtggctgctccatgatgattcccgcccttcggatgcctcatgccttgaacgattgcttgaggcgtggcgcaatacgccgggcgccagtgtgctcgggtgcaaacagtgcgattgggaaggctcccatctgcatgatgtcggtatgtatgcgggtcaccacgccgtgcattccctggtggtcgatggagaacccgatcaggagcagtatgacgggcggcaggatgtgtttgcggtgtcgctggcaggcgcgctggtgtccatgtcgcaattcacgcgactgcggggcatcaatgcctggctgaccacctacagcgaatcggttgatttctgccgccgtgtctgcctgagcggcggacgcgtggtggttgtcccgcaagcggagatatcacatcgtcgcgcacggtatgagggcattcgtacgcgaggcggggaaccgcttaaggacgatcacacggtcaatcatgcgatgacggtgcatcgctcccaacagcggtatctgtacacggacctggccatgtcgtcctggtttatcgtctggctgtggaggctgctccgcagttttggcatggccatatccatgatgttcggcaagaagccgtatgaagcatgggtgcaattgtgcctgccatggctggccttggccgatatcgcgggaaacatgaaatcacgcagtctggtggccagacaatcgaaggtcgccgcatcgtccctgcatgtcttgttcgcagacagtcagcagatcaagcagttccatgatcgtcgggatgcattccaatctcagcagggcagagtgctgctcagtccgctggaacgtgcccatctgcggacacgcaccatatatcgctggagtgcggccgtggtgatggcgctggtgtgctttgcggccatcgcggtgatgtattggccggtgttccgttcgatattctccggcggatcgttgtattccgatgtgttgcttcccaccggtgccagcttcacgcaactggtgcagtccgccaccacgccgtgggtgtttggcagcggcaccggcattcctgcgccgcccacgccgtggctgctggtgctgatgctggcctcgttggtcacgctcggccatgtgaccgccgctttggcgatgatactgtttgtggccgcgccgctgagcgcattgtcgttctgggcgctggcgggcgtattcacccgctcggacgtggttcgtgtgctgggaggactgctgtgggcatccaccggcattatgttcggctggtatgcgcaggccaatatgccgatgcttaccgtaatggtgttcctgccggccgcgttcgcattcgtgttccgtgccgtgggcatgtaccataccgaagacccgctcaagccgcgcacatccgttcaggccgcggccatcgccgcactgtgcttcatccctgtggtggccgctgaaccgcagctgctgttcgcgctgatcgtcgtgttcctgatgttcctgctattcgtgcgtcgcaagcgcgccatgctgttgctaattccggttcctgccgcctttgcggtggctcctacgctcgtcaatgcggtgcgttacgccgatttgggcatgtggcgtcaactgttcggcgacatcacggtgccaacgtcatccgccaacgggtcgccggcgtcgctgagtctgcttgaggccgcacagcgtgcgctgggatggcgaatggggtcgactgattatgccgatttggcggtcactgtgctgtttggcgtcatcacgctgcttgctcttgcttcgctggtgctgccgttcgcgttgcggacctcgcgactgatgtgggtggtaatcgtctgcggaggcgcgctcgccctggtctccagccgtgtggccataaccgtggatgccgatggtgtcgtggccggttccgcgcagccgggcatcgcgatgatgatattgggcttcctcgcctgcgtgtgtctcgtcgctggtggggcggtgaagcgattccaaccgttgcatgcgtctggcagtgatcccgcatcgaaaaaggaccgtctgcatgtgctcatcgtgtctggccgtgtggtgcttgctctgatactggtgtgctgcattggcatccaatgcatgtatggcatcgaacgtcataaggatgcgggactgggcgtgtctgaaaacggcctgcccatggtcaccaccgattatctggaggccggtgccgatcatcgtgtgcttgccgtgagcgcggagacccgcaacatcgtcaactatgcggtgatgcgcacctcgcgcggcgatttgatcgacagctctccggtccagcgggcgcgcctgctgtccggcaagcatgatgcggttgacgaacaactggcccaggcctgtgcctcgctgctgtccaatcccgacgaagaagccatcgcggccatcagcgcgcttggattcggcggcatctacgtggttcccgagaccggcgattccttgaacgacatgccgtatgaacagttgagcgcgaatatcgccgcatcgaacggcacccagtccctggtctccacggatagcggcagctactatcgtctgacgctgcgtagcagcgcctcacagcaggtggatacctcatggcagcaacgtgcacagcatagtgtctggaggcacgcctggctgatatgcctaggtgtgatcacggcgttgtactgcttggtcgccatgcctcgcagacgaccgtcctacggattggaggagcaggcatgagcaacaaaacttctggtttcaaacgtgcgatcggcatcgtgctcggtgtgatcaccatgctggtgttgattgcgctgttcgtcgttctcgtcatggcccccatccccaatatctgggtggataaggtggccgcttccgataatgccatcgaccagaccgttagtccgacccagtccgaaacctactgcccggcacctataggattggccgataccggcacgtacggcgacagcgccttccaggccactgtcggcaatctgagcacacaagcgcgctatgcggcgttcggctccgtctacagcgccactgtctcggcgatcgggcaaaagtccagttcagatgacgtaactttgaaagacgccgattcgaccgacgattcctcggtgaaaaccggtgctcagaagatcaatcagggagctcgtctgatcaatacccgtatgctgcaggccgcagctggcaccggcaccgtcggcaccatcgcatcatgggccgatgatggcgatgtgagaggcatatcggcggcatcctgcgtatcgacctcgctcagccagtcgttcctgctctccgacagcacgaccggtaccacacagcagctcatcgtctcgaatctctccaccaagccgaccaccgtcgacattgccgtctggggttccgagacagccgggaaaatggcattgtccacccaatccacgctgtctgtgccagccgagggggagtcctcgatggaactgtccgccgcggtcgatgggcagcatggtctgttcgtgaccgtttccagcaaggagactcctatcgcgtccgtggtgcgcacggtgaccatggatggtctgacaccgaagggttctgatttcgcgctgccgctgccgaccgcatccaatgcatcggtggcgccgtccatcactgccggcgatgcggtcaccgcttatctgttcgccaaggcagacaccagcaccgggctgtcatggattaccgccaaaggcttggttcccgccaaagatgccaccgtcactgctgataaagtgacggcgatcgacttgggagaagctcctgatggggcgttgggcgtgatgtccaccgcagaggacgccgtgtcgttctccgtcaaggccacacgctccggtgactccggccaagccgatttcgcattggtcaatgccggcgagccatccgaattctcggggttggcccttcccgacggagtaaaggcctccatcacgctggccaatacgtccaatgcgcgcaggacggtcaccttgcgcgcctacgatgatgccggtgcttcggtaacctccaaggaaatcacactggatgcgaacgcagcacaaacgattgaagccggcaatctttccggcgatcatggcaccgcggtcgtgctgatgttggaggactcatccaagaaagtgagctggggagcgcggttcagtcacgattcgttgcaagacaaggacatcgccggattgtccgtcatcgacgcttcaacgctgatgcccgccacggttcatgtctgggctcggaacgattcctccatcgtcaagtagaagggtatgctcgccgaagcgtcagtttgatgatgtttcggcggcgatatagctgcgggccgtgccactaccttattacaagtgacacggcccgcagtgttgtcacaggccccagtcggggtcgatttcctcgggcctgcgcccatacaattccgctatgcgggccaccagctcatccctgacggccaattgcagttcgagcttggtaggtgcctcggtctgcaacggcatgcggtagagcacgactcgtgcgggaatgccgtggctggcggggaagcactgggacgtcatattcggctcggtctgccaaggcgtcggatccgaaggcggcacatcctccaccgcgaactggagcggacgtatcagttccggccacgcttggccgagcctgcgaacctgggccgccaccatatcgtcgaacatgccggtgcgagtgcggtaacggggcagacgggtgccgaacatcggggttcgtgtgccgcgaccgtggcggttgcggtagattcgtgcgttccaaggtggctgaagcatggttcccaccatagggcatggcggaggcaacatgcgttaggattggttcattggctgtgaacattcgtcaacgagggaggcacgacaaatggtggtacgttcgtggtccgaacttgatttcgataatgtctgctccaacgccaaggtgttcggtttcgatttggacaacacactggccagctcaaaacagccgatgaagcccgcgatgatcgaacggttctgtgcgttgctcgaccatacggtggtggccctgatctcagggggcggcatggcggtggtcacctcgcaggtgctggatgtactcaccccgaatgccaggcgcggcaatctgcatgtcatgcctacctccggctcccggtattaccggtgggatggcacgcaatgggccttggtgtatgcgcatgatctgtccgaagccaccgtggctgctgtctcggaaagtcttgagcgacatgcccgggaactgggattgtgggaacagcaggtatgggggcctcgaatcgagaacaggggcagccagatcaccttctccgctcttgggcagttcgcgcccgtagcggccaagcaggcatgggatcgcgataacacgaagaaacaggcgctggtcgaagcggtcaaggccgatctgccgcatatgcgggtcaaggccggcggatacaccagtgtggatgtcagcgaatgcggcatcgataaggcctatgccgtgcgcaagctgacgcagacacttggcatacgggccgatgaaatggtgttcgtgggtgatcgcatgacgcctacgggtaatgactatcccgcggttgaggccggtgcgatcggtgttcgtgttgagaatccgcaagatacggtacaactgctggatgcactgcttgcgcgattcgatactccagctcgatagtgacgcgttatggacgggccgagcgtatacaagtggtggcatgcgatgtgggcacaggtctgcaatctgctgtttccacgcggctgcgctgggtgtgacgcgccggatgaggtattgtgtgcggcatgctgggccctgttcgcgcaatgccgggaacgggatgcagacagtggtggcggagcccgtatatggtccgcatcgatttatcagggagcggtacgtcgtgccattctcgactggaaggaccacgacgataccgagcttgacggcccgttcggccgcatcatggtgtcgctgctgaacaagacgccaataccatcatcatgcttgggtcatcgcgtattggtggttccggtgccatcatcgcgggcgtcaatgcgccgaagaggacgtgcccatacggcaccgttggccaaatcggtggcaggggcattgcgtgggtacggcgtcgatgcgcgaccatgcaatgccctgagctcctccaccaaggcacgctccgtgcagcaggtctcttcggcacagcgtgcccgtcgtatcaccggtcatgtcagggtgaagcgtgatctcatcggcaatggcgacgcggtgcttctcgttgatgatatcgtcaccacaggtgccactgtgcggcaatgcgttcaggcgtttcagcaggccggcaccaaggtggtgggcgtgctggtattggcggatgccgtggtgcgacggtccgatgacgatatcaacgggtgaatgacatcggtgacgatgccccagatagcaggcgaagcgccgttgctcggcatgtaatcggggtatcgcggattctcggcgtgcaatatggtgatgccggcccgtgaaaccagccgcttgatggcgatttcgtcgtccatgacagccgcaaccacatctccggggactggtgccaacgaacgatcgacaatcagcagatcgccgttgtgaatacccgcattgatcatggaatcgccggccatctgcataacaaacagcgtggcctcgtgcgccatggcctgtgactcggattgctgtgtcatgctgcgcctcccaccctgtattcgaacatctgttcgaatacagtatacggtaggacgtcggacaatatcagcgttcggcgatgtgatatttaggcaggatgatttcgaaatcggcacctcgcgtgtcgtcgaccactttgacggtgccaccgtgcaattgggccgcccagcgcgcgatggacaggccaagaccggtgccgcccgactcggtgccgggacccgtcttgcctttgacaaagcgccggaagatgtccaaacggtcggaaggtgcaatctgggagccgaaattcaccacattggtcacgatggtgccttggttttcgtcctcgtgggcgtcgaccagcacggtggtgccgtcggccgaatgtttcagcgcgttggcgatgatgttggtgaatagctggcgcaggcggtcctgatcgccttccatcgtgatgtcggccggcacggtgacgcggatgtcgtgggcgtggccaccatcggcgatttccaacggctcgatggtctcgtcaagaaagtcggcgaagttgaacttttcgatattcagactcgccgcaccggcctccatacggctcaggtccagtaggaaggcgatgagatcggagagacgctgcgtttgggtgaggatgctctccagattggtgggagtgggctcggtgacgccgtcggccatgttctcgaccatcgcctgcaaagcggaaacgggcgtgcgcagctcatggctcacattggcgatcatgtcgcggcgcattttatcggcatgctcgagttcgccggccatctcgttgaacgagcgagccagcttgccgacctcgtcatgacgatcctgatcgatatccacgcggaccgtgtaatcgccatccgccatggcttcggccacatcgcgcatctggcgtaggggagcggtgatgccgcgagagaagaaataggtgatgcccaaggccaccaccaaagtcagcggcatggcgatccaaccggaccagccgaatttcaggaggaaccagcacatggcaaacgcgatggcagtggcgataacgatcagtgcgctgagttccagcttcagagatgagaacaaatcaaccggcttgacgcgaggtttcatcgcatcaagccgggattgctgttgttttttggatgccatcacgcggtcggcggctcgaaagcgtagcccacgccatgcacggtgcggatggtatcggcaccgagcttatggcgcagcgccttgacgtggctgtcgacggtgcgggtgccggatgcgtcgacccagtcccagacctcttcgagcagcttttcgcgggtgagcaccgacttcgggcggcgggccagcgtggccagcagatcgaactcggtgggggtcagatgcacctgttcgccgttcacggtgacgatgcgctgggccgggtcgatgaccatcgaaccgaagtcgagcagcttctcgttctccgagttcttggcgatgaccttcgcacgctccacgcggcgcagcagcgccttgcagcgggcgataagctcgcgcatggagaacggcttggtcatgtaatcatcggcacccgctcccagaccgatgaccttgtcggcctcgtcatcacgtgcggtgaggatcagcaccggcaccggacgttcggcgacgatgcgtttggtggcctctagaccatccataaccggcagcatgatgtccatgatcaccagatcggggcgtagctgggacgcggcctggacggcggaagcgccgtccccggccacgcgagcggtccatccttcagcggtgatgcgctgggcgatggccgtggcgagcgtgggctcgtcctcgaccaccagcaccgtgcgcggtgtcgtattctgacgcgctgtggtattgagcataaataaaccggttacctttcagcctgttgaccagttcagtcttccggcttcaagaatacaactcccagagccggaacggtgatcttcgccgagaacggacgtgaatgatattcgccctcgaccgcttcgaaggtgccgttgtggatgtcggagccgccgtacttggcgtcatcggtggtgaacacttcggtccacttgccgccggtgggcagcgccacctggtaatcggaccaggcctcaccggagaagttgaccaccacagccaaggtctcgcccttggtaccgatgcgcaggaagctcagcgtgttgtggtcggcatcgtcgctggtcagccactggaagccggccgggtcgaagtcctggctccatagtgccggatgcgccttgtagaaggcgttaaggtcggcgaccatggtctggacctgacggtgctcctgccagttcaggcaattccaatcgatggaggcgtcgtgatcccactcgccccactgggccagctcgttgcccatgaaggagagcttcttgcctgggtgagcccactgataggcgaacatcgaacgcacgccggccagcttctgccagtcatcgcccggcatcttgccgtacagggaacccttgccgtacacgacttcgtcgtggctgatgggcaatacgtagtgttcggagtaggcgtacaccatggagaaggtgatctcgttgtggtgccacttgcggttgatgggctcctcgtgcagatactcgagggtgtcgtgcatccagcccatgttccacttcatgccgaagccgatgccgccggcggaagtgggggcggtgatgcccggccatgcggtggactcctcggcgatcaccatgacgccggggttgttcttgtacgcggtggcggtggcctccttgaggaagtcgatggcctccaggttctcgcgtccgccgtagatgttcgggcgccaatggccgggttcgcggctgtagtcgaggtagagcatggagctgacggcatccacgcgcagtgcatcgacgtgcaggtcctcaagccagaacagggcgttggccaccaggaagttgcgtacttcgcggcgtccgaagttgaacacataggtgccccattcagggtgttcgccgcgcagcgggtccgggtcctcgtacagcggggtgccgtcgaagcggccgagcgcgaaggcatccttcgggaagtgggcgggcacccagtccatgatcacgccgatgccggcctgatggaactggtcgaccaggtaacggaagtcgtcgggggaaccgagacgggagtcgaccgcatagtatccggtgacctgatagccccaggagccggagaacgggtgctgggccagtggcatgaactccacgtgggtgaagccttcctgcttgacgtagtccacgagctgcttggccaggtcgcggtaggtcagtccctgcctccagctgccggcgtgcacctcatagatggagaccgggccatcatgcgggttggtggtgcggcggtgctgcatccaggcgtcatcgttccacttgtaggtggattcggtgacgatggaggcggtgttcggcggaacttcgtgctgacgctccatcgggtcagccttcatctcccacgtgtaattggcgttcaggatctggaacttgtaggtctcgcccgcgccgattccggggatgaagatctcccacacgccggaggagccgagctcgcgcatggcatgacggcggccatcccaagcgttgaagttaccgactacgcgcacggcatgggcgttcggggcccacacggagaatgcggtgcctaccacctgttcgccgggcgtgccgtctgcgccgcccatcggatcgtcatagcgcagcacatgcgcgccaagcgtctcccagagcttctcgtgacggccctcgccgaacagataggtgtccatgtcgccgactgtgggcatatagcgatatgggtcgtcctcaatgagcactgcgccgctttcccactcggtcctgacacggtagtcgggaatcgtgggctgcttcttagtgccggaagccggcacggtaaccacgaacacgccgttgtattcgtgggtcatcgggtattcgccatcctgggtgaggatggtcacggacttggcaagcggacgcagcacgcggattgtggcggtgtcggcatgcttgccgatgccgagatgcccgccgagaactccgtgggggttgtagaattcagcattgctcgtcgcatcgaggtcgccttgggcgacaggcacggtgacggtatcttccttgatcttcgtttctttagccatgtcccaaagtctacgtgcgttgaagtcgaaaacgctacattggcgcgtcgaaaatggcgaattcttgcccttttcgttgtgtttccgtggttgtgagcgctctcataggggtggtccagaccgcatggcataattattcgagttttcgtgtgtaagccgtcagttctcggagggtacatgtcttacaaagtcggcgatatggtcgtctatccgcgtcatggtgcagcgaaggtggaggccattaccgagcggacggtcaagggagtgacgcgcgaatatctgcagttgtccgtactctcttccgatggtttggtcatcaacgttcccgtggacaatgccaagaaggtcggtgtgcgtgacatcgtctccgcatccgaagtggccaaggtgttcggcatcctgcggaccccgatcatcgagaaagagatgaactggtctcgccgttacaagctgaacgtcgaaaagatcgccaccggcgatgtcaacaagatcgccgaagtggttcgcgatctcgcccagcgcgatgtcgacgagcacggcctgtccgcgggcgagaagcgcatgctcaccaaggcccgtgccattctgacttctgagatcgccttgtccgagaagatcgacgaggcggaagcccagcgtctgctcgacgtgaatctgggctacgagcccgctcagcccggtgacgacaagcatcacaccgccgagcccgaagaggccgcggccgatactttggctcgtgttgaagccgagaagaagtccaagaagaagtgatttgattgttttgaggccccggtcgtgtccttatgcgatgcgccggggcttcgtgattcataatcgtttgctgccgttcgtctgggcaacgccatcgaaggggactgcatggggtctgtaggagtgctgatagggcaaggttttgacgctcaccgttttgcgcctgctggctcaggccgtgaactgtggattgccgggctctactggccggtgcctgattcatgcagcgaggccgatgccgccaaatacgaggggatcgaaggcgattccgatggcgatgtggccgcgcacgctctgattgacgcgttgcttgccgccgcccgattgggagacattggttcactgttcggtgtcggtgcggacgcgcatggtgccggaatgcatggcatcgatatgttgcaagaagttgtggcgcatctggcatccaacgggtatacgccggcatcggcctcggtggcgatcatcggcaaccgcccgaaaatcggcacacgccgtgctgaagccgaagccgccctgtctgcggcggttggttgcccggtatcggttaccgccaccaccaccgaccatatgggattcactggccgcggcgaaggcatcgccgccatcgccaatgccttggtggagaagatataacaaagcccccgctatgaattcgccagcgggggcaagaaaaaatggatgagattacttccgcatcgtctccacggctttggcgatagcccagaacagggtggaaagcgtcacgatgatgaagctcgggggagcggggaacatcgccgacagcacgagtccggcccaaatcgacaccaagcacagcacgctggcgatcaccattgccttgaatggggagccggccagaatattggcggtggccgcgggcgtaatcaccagtgcgaaaatcagcaaggtgcccactgccggcacggcgatggtgatcacaccggccataatcgccataaacgccacgttcatcagcccgatcggcacacccttggcctgtgccacctgctcatccagcgagctgaacagcagcgggcggtagatgatggccaacaatgccagcagcagtacgtcgaacacggcgaagccgatgatctggccggtggtgatggtcaggatcgagccgaagaggatcgactgcatctgctgggaggcggaactcgacaatcgcgcgaagaacagacccaagccggtggcgaaggccagcacggtgccggtggcgatttcacgctcggaaacgcgcttgcccaaagcaccgatcaccagtgcgccgcccagtgcgaacacgcccatgcccagtgacacgggcaggccgagcaacaccgcgccggtcgcgcccggcagaccgatatgggccagcgcatgggccgcgaaggtggaacgacgggcgatggtgaagtatcccatgacaccggcggccagggcaatgcacaggccggcgatgaaggcgttggtcatgaatggagcggacagtgtatccagccattcgggatcatacgaaaagttgatggtgctcatgtctctgtattttctccatgcctgagctacagtccgttgatgggctgtgggtcggctcgcttgatgttatcgattctcggcgctgttggcggtactgccattggtggcattgccgtgctcgtgatggtgcaattgcgccacttcggctgccgtgtgcatatcctgcggctggtcctggagctcatccggcgtcggggtcacgaacatgtctccctgcggagtggtgaccacctgcacctgtgtgccgtagaggtgggtgagtaggtcggagtcgagcactttgtgcatatcggcgtagtgcgggtgaccgtcgagcaagtagacggcaccggtcagaatcggcaagagcatattgagatcgtgcgcaaccacctggatggtcatgttcagttcacggttcagcttggccagcacgtgtacggtggcgcgctgactggccagatcgaggttggccaacggctcgtcaagcatcagcagttgtgggtcgcacaccaacgcctgggcgatggccacacgctggcgcaaaccgccggacagttcggacagacggtaccgcgccttgtcggcgatgccggtgaactccagcgcctcgagtgctttggctttctgggccttggtgatggggtggatgccgaatcgggtgccggtcaggcccagcaacacggattgttcggcggtgagattggaatcgacattcgccacatagctctgcggcacatatccgatgcgtttgttcatctcgcctgcgggcttgcccagcacggtcaggctgccatggcagagcggcaaaaggcccagctcggccctcatcatcgtggttttgccggtgccgttggtgccgacgatggccgtgaccgaaccggtgggaatggcgaaggtgccatgctgccagatgatatggtcgccacgcttgatggcggcatcgctgaacacgatgcaatcggaagtttcactcataacgcccgattgtggcaaacgatgctgacaatcgttctcaatatcgtgtacggatggtgataaccaaagagaagggttgtgcggccatctcgacaatggtcgcacaacccttctcgtgcaaggcgtctatcggcattggcgcgaatccgatgccggtgtcctttgcttctaactatttgccggagtcggtctggtcgttgccggaggcatcgccgggatcgccattggcggcatcggcctttgccgaatcctgagatgagtcgctggatgcgtccgccttgcactgacggatgtacttgggctccgtgctggaaccggtgctggccttggagccttgcgcattggcatcatccgtggcggagccttcggcgctggaatcatcggaattcgcgttgctgtccgcggtatcgccgtccgtggcgtcttcgcagccatagcttggatccaccgcgtcgatgatggtgttgatgagctggttgatccaggcgttcagcgtgtcggcatccttgggcatttgttcggagacgtcgactaccggtacatcggcacgaccggcagcgccagtgatcatattggtcgcgtcactggcttcctgcgtgttgttgaccagcacatccacgcccttgtcttcgatgagtttctggaaagactgcaggtccgcgggtgccggttcgccgccggaagcagtcgattgcgtataccccttgggcgtctgatccttgaacccaagatcggccatcagataatagaccacgggttcggtggctgcataggtgaggttggagtgggacttggtgaactcggacgcccatgtttccaacgatttctcgtccgcctgccatgccttgagccgcttctggaaggccttcttcttgctggggagtgcctttatatatgcatcggtgatggccgtggccatgctggatcgagcgtctttggagaaccacagatgcgggttatcgccctcgacggcacccatgacggaagcggcggatacgatattcgtggtcttggtcatcgatttggtggcccaggaatcgtagcccgcaccgttggccacgatgatttgggccttggacagcttggcgacatccgaggtctttggctcgaaatcgtgggcatccacattggtggagttcacgatggacgtgacttccacatcatcgccgcccagctcggcagccagcgagccccattgattgagggaggccaccacattgatcggcccggtcggtgcgggaacgctggtcttgttgtccggctcggtttcagcgggggaggtggctgcgcatgcggtggtcgcgaacaacaggacggcgctcaggccggctgcggcgagtcgcgtaagtcgtgtgatttgagtccccatggcacgccttcttcgtgagagcgaacgatatataatcctgacttgttccaacgatagcctatcgtttcgatagaatgcaccgaaactacaggggagggcgttgatgtccacaaaaatcgacggtaagcagattgcggccgaaatcaagaccaaccttgccgagcgagtgaacaagctcaaggcgcagggcatccaaccggggctgggcacgctgctggtgggcgaggaccccgggtcgatgaagtacgtggccggcaagcacgccgattgccaggaagtgggcattacctcagtcaagaaggaactgccggcggacgccagcttcgacgacatcgccgctgccgtacgcgaactcaacgaagatccggcctgcaccgggttcatcgtccagctgccgttgcccaagggcatcaacgagaacgcgatcatcgacatgatcgacccggccaaggatgccgacggcatgcacccgtacaaccttggcgaactggtgctgcatgtgcgcggcgacatttcgacgccgctgccttgcactccgcgcggtgtgctcgagctactcgacgcctatgacattgatctgaacggcaaggaagtgtgcgtgcttggccgcggcatcaccattggccgcacgattggcctaatgctcacgcgcaacgccgtcaacgccaccgtcaccctgtgccacaccggtacccgggatgtggccgaccacatgcgccgcgccgacgtgatcgtcgccgcaatgggttcggccggattcgtgacgcccgacaaaatcaaggacggcgccgtgctggtcgatgtgggcgtcagccgcgtctacgacgaagaagccggtcgctaccgcatcaagggcgacgtggacaaggcctgctacgacaaggcctccgcctacacccccaaccccggaggcgtgggtcccatgacccgagccatgctcctagccaacgtcgtggaaatggccgaacgacacgcctagagtttcctaggaaatttgggcagagttgcttgtattgtgaatatctgtatgcctgtagggtgtgcgtataactgaatatcgagaaattatccatccactattagaaaccatatatttacatggcagagaacaacactgaagtcaccaaggttgccatcaacgacatcggcaccgaagaggacttcatcaaggcagtcgattccaccatcaagaacttcgatgatggtgatctggttgagggcaccgtcgtcaagatcgatcacgacgaagtcctcctggacatcggctacaagaccgagggtgtcatcccctcccgcgagctttccatcaagaaggacgttgatcctgacgaagtcgtcgaggtcggcgacaccatcgaggcccttgtcgtcaccaaggaagacaaggaaggccgtctgattctgtccaagaagcgtgcccagtacgagcgcgcctggggcgacatcgagaagatcaaggaagctgacggcgtcgttgagggcaccgtcatcgaagccgtcaagggcggcctcatcgtcgacatcggtctgcgtggcttcctgcctgcctccctcgttgagatgcgtcgcgtccgcgacctctccccgtacatcggccagaagatcaaggccaagatccttgagctcgacaagaaccgcaacaacgtggtcctgtcccgtcgccagtacctcgaggagacccagtccgaggtccgcgagaccttcctgtcccagctcaagaagggccagatccgtgagggcgtggtgtcctccatcgttaacttcggtgctttcgtcgatctcggcggtgttgatggcctgatccacgtttccgagctgtcctggaagcacatcgaccacccgtctgaggtcgtcaaggtcggcgacaaggtcaccgtcgaggtgctcgacgtcgatctcgaccgtgagcgtatctccctgtccctgaaggcgactcaggaggatccgtggcagcgcttcgctcgcacccacgttcccggccagatcgtcaagggcaaggtcaccaagatcgtccagttcggtgtcttcatctccgtcgaggacggcatcgagggcctggtgcacatctccgagcttgccaaccgtcacgtcgagaacccggagaccgtggtcaagccgggcgagaccgtgttcgtcaaggtgatcgacgtcgacctcgatcgtcgccgcatctccctgtccctcaagcaggccaacgactccgttgatccggcttccgaggacttcgatccggccatctacggcatgccggccgagtacgacgagcagggcaactacaagtaccccgaaggcttcgacccgaacaccaacgagtggatcgctggttacgagaagcagcgcgaggagtgggagtctcagtacgccgccgctcacgagctgtgggaggagcacaaggagttcgtggccaaggagctggagaacgctgccgaatccgcagccgccgacggccagggcccgaaggaagagaagccggtcgaggagacctccaactactcttccgctgctccgactaccggtaccctcgccgactccgatcagctcgccgccctgcgcgaccagctgctcggcaagtgagtttgccgcgaagctagcgcttagcgtttaaggaaacccggtccgattgggccgggtttcttgtgtttttggagttatccgccaatgactcacctcagtctcgctacgcgagccggatcccctccctgaggggagctgtcggcgataaccggccgaggggagcgccagctatcatgggcaccatgatgcgaataggactgaccggcggcatcgccgcgggcaaaagtacggtggcggcgcgactcaagcaactcggcgcgttgcatatcgactacgatgcgctggcgcatcagatcgtcgaacccgggggagtggcgctgccacagatcgtcgccgagttcggtcctgatgcattgctcgccgatggcactatgaaccggccatggattgccgatcatgtcttcggcgcgaacgccgcgccgggcgcacgtgaacggctcgacgccatcgagcacccattgatctatgccgaggcggcgcgactggagcatgagcaccccgaggcagccatcatcattcacgacattccactgctcgccgaggtcattgacgatattccattcgcctttgaccatatcgtcacggtcgaagctcccgtgtgcatgcggctcgaccgtatggtcgaggaacgcggcatgagcctggaacaggccgaggcccgcatccgccaccaatccagtgaggaggagcggcgggccatagccgatatcgtcatcgactccacccatccattgcccgagatgctggcccaagtgggtgagatatacgcaggatggtgcgcaggtcgctaagatgaggccctatgggattcaatatcgagcgcgcggacaagcctttcgtcgtcaaatcgccatataagccatccggcgaccagccgcaggccatcgccgaactggccgaacgcatcgaaaacggcgagaatgatgtggttcttatgggtgccaccggtaccggcaaaaccgcaaccaccgcctggctgatcgaaaagctgcagcgaccgaccctgattatcgagcccaacaagacgctcgccgcgcagctatgcgccgaattccgcgaactcatgccggacaacgccgtgagctacttcgtgagctactacgactactaccagcccgaggcatacatcccgcagaccgacacctatatagaaaaggactccaacatcaacgacgatgtggagcgcctgcgccaccaagccaccgcaaacctgctgacccgccgcgactgcgtggttgtggccaccgtctcctgcatctacggcttgggcacgccggaagaatacgccggtcgcatgctcttcctcaaagtcgggcaggaaatcaaccgcgacgacctgctgcgccaattcgtggccatgcagtacaagcgcaacgacattgccttcacgcgcggcaccttccgcgtgcgcggcgatacggtcgaaatcatccccgtctacgaggaactggccgtgcgcatcgaattcttcggcgacgagatcgaccgcatctccacgctgcacccgctgaccggcgacgagatcgacgaggaaaacgaagtccacatcttcccggcctctcattatgtggccggccccgaacgcatggaacgggcgctcaaaaccattcgcgaggaactcgaagaacgcctggcagaactgcgcaaacaaggcaaggagctggaagcgcagcgcctcaacatgcgcaccacctacgatctggaaatgctcacccaagttggcgtgtgctcaggcgtcgaaaactattcgcgccacttcgacggccgcgccgccggcaccccgccgcacacgctgctcgacttcttccctgacgacttcctgctggtcatcgacgaatcacacgtcactgtgccgcaaatcggtgccatgtacgagggcgatgcctcccgcaagcgcacgctggtcgaacacggcttccgtctgccctccgcgatggacaaccgaccactcaaatggccggaattcctgcagcgcgtcggccagaccgtgtacctgtccgccacgccaggcgactatgagatgggactgtccgatggggtggtcgaacagattatccgcccaaccggtctgctggacccgaagatcgacgtacgcccggtcaaggggcagattgacgatctgctcgccgagatcaaggcccgtgtggccaagaacgagcgcgcgctggtcaccactctgaccaagaagatggccgaggacttgaccgactatctgctggaacgcggcatcaaggtcgaatacctgcattccgatgtggatacgttgcgccgcgtcgaactgctgcgcatgttgcgcgaaggcaagatcgatgtgattgtcggtatcaacctgctgcgtgagggcctcgatttgccggaagtatcgctggtggcgattcttgacgccgacaaggaaggattcctgcgctcctatcgttcgcttatccagaccatcggccgtgcggcccgaaacgtgtccggcacggtgatcatgtacgccgacgagaccaccgaagccatgcggcaagccatcgacgagactgaccgtcgccgcgccaagcagattgcctacaaccaggagcatggcatcgatcccaagcccctgatcaagaagatcagcgacgtcaacgacatgctcgccaaggaggatgtggacacccagaccttgcttgaaggtggctaccgcaacgcgggcaaggccggcaacacgcacctgggcgtgccggtactcgatcccaacgaggcagacaaacgccacgaggagatcctgaaggccggcctgcccgcgcaggacctcgccgacctgattcgccaactgagcgaacagatgcacaccgccgccgaacaactccagttcgaactcgcggcccgtctgcgcgacgagatccgagacctcaaaaaagaactccgtcaaatgacggaagccaacaagtaaccaaattcccatacccgaggcgggcagtcaggggatgcgttgtcgaccgtaaagacttggcctgagcggcccggagcgtgtcgaacaacacatcccctgactgcctggcgatcagcgctaccggaacggccccaaaaccgtcacatacataagttagtgtagggaatcatggcagaaaccccactcgcatttgaaatcatcaccttcgtggtgctcgcattgttctttatcgtcgacctgttcgtcatcgggcgccgaccgcatgtgccctccaccaaggaatgcgtgcagcatatcgccttcttcgtggttatggcgctgatcttcggcggatgcatctggttcttcgccggctccaagcccgccatcgagttctattccggctggctcaccgaatactcgttgtccatcgacaacctattcgtgttcgtcattatcatgtcgaacttcgcggtgcccaagcagattcagaagtatgtgctatccatcggcatcaccattgctttgattttccgtggcattttcattctgatcggcgcggccctgatctcccgcttcacgtgggtgttcttcctgttcggtgccttcctgatctacaccgccgtcaaactggtgctcggcggcgatgaagatgaggaatatcacgagaacggcatcatccgtaatctgcgcaagatcatcaagattaccgacgactacgacggcgagaagctgcgcaccaccaagaacggcgtgcgttactggaccccgatgctcatcgtgttcctgaccatcggcaccaccgacgtcatgttcgctttcgactcgattcccgcgatcttcggcctgaccaaggatccgttcctggtgttcacctccaacgtgttcgcactgctcggcctgcagcagctgtacttcctgctgggtgctctgctcgacaagctcgtctacctgcctgccggcctgtccgtggtgctgggcttcatcggcgtcaagctcatcatggaggccctgcacggcaataccttgccgttcatcaacggcggcgaaggcgtccattgggtgccggaggtgcccacatggctgtcgctggctgtgattgtgctcgcaattggcggcgcatccgtggcttccgtgatcaagatgaagagcatggaaagcgctgaaaaggcctgaaatcgttagagaatacaacccttaaatccagtcaacacaacaatgtgagcgctcacaacacaccgtgaagaaaacttgtcatgagtcggctcgcgctagtagactgggttccggcaaatggggcaatcgcgcctcgaaccaaattgaacaagaataggcaggcattcatgcgtaaagccaagatcgtagacaccatcggtccttccaccgaggattacgacaacctcctgaagctcgttgaagctggtatggacgttgctcgtctgaaccgctcccacggcacccccgaggatcacctcaaggtctacaacaacgtgcgcaaggccagcgaagccactggtcgcaacgttgccgcgctcgttgatttgcagggcccgaagattcgctgcggttggttcaagaagaacgccgatggcgaagacaaggttcagctgcagctcggccaggaattcgtcatcaccactgatgacgtcgagggcgacgagcacatcacctccaccaccttcaagggcctgccgggcgattgccacccgggcgacccgatcctgatcgacgacggcaaggtccgtcttgaggtcaccaaggtcgagggcaacaacgtgtacaccaaggttgtcgtggccggtcctgtgtcctcccacaagggcatcaacctgccgggcgtcgccgtctccctgccggctctgaccgagaaggatgaggccgacctgcgttgggccatccgcaccggtgccgacatcatcgccatgtccttcgtgcgtttcgccaccgacatcgaccgcgcccacgagattatggacgaggaaggccgtcgcatcccgatcatcgccaagatcgagaagccgcaggctctggagaacctcgaagagatcgtcaagaccttcgacggtgtcatggccgcccgtggcgacatggccgttgagtgcccgctggaagaggtcccgctggccactaagcgcatcatcgagctggctcgccaatacgccaagccggtcatcgtggctaccgaagtcctcggctccatggtgaactccccggttccgactcgtgcagaggcttccgactgcgccaacgccatcctcgacggctccgacgccaccatgacctccaacgagaccgccgttggtaagtacccggatgtgaccgtggccaccatggcccgtatctccggctacgccaccgaccacggcttcgaccgcatcccggagctcaagaaccttgacatgtcctccaccggcgctgtctcctccgccgctgtggacctggccgacaagctcaacgccaaggccatcgttgcttacacccagaccggcgccaccgtgcaccgcgtctcccgtgagcgtccggccgccccgatctacggcctgaccagcaacgagcacacctaccactggctggctctgtcctggggcaccgaagccttcctgctcaaggaggactaccacgacaagtcccgcaaggatctcatgatctacacggacaaggtcctcaaggatgccggcaaggttgctgacggcgacaagatcgtcatcctgagctctgctcagggcgagcaccagccgggccgcactgactccatctacgtgcacaccgttggcgcttgcgactgatttcaggcttctggtagctgctgacagctagcatatagcacacgaaagcccccatccaaagtggatgggggctttcgttatctgttatgttgcgattgtgtggtgattgcaatggcccacagtcaccgcggtgatcgagcgtggcgatcagtcgttgagatgatcgagcgtgccgctcttcaggcgcaaaatggcgaccatggtcttggcatccacaatcgtgccattgaccaccatctcataggcatcgtccaccgacaccatacgcacgtcggaacgcggagtctccgggccgatttcctgacgggaagccggggtaagaccggtggcgaagaagattgcggtgtgctgggtggaatagctcggcgtgttcataaaacgggtgaactgcgtaagcttggtggcgtcgaaaccggcctcttcggccagcttgcgcttagctacatcggtcgggcgttcggacgggttgttggcgtgaccggccggaatctccaacgtccaacgatggttggcgatgcgatactgctcgaccagcggaatcatgccatcatcggtgacggccagcacagccacagtgtcgccattgttctcctgaacaaagtagcgttcaaacgaaccgatttgattcgactcataggagacgtgatcgacattgaaataatgcgtctccacaatctgtctacgggaaatctccttgaccggagaggggcgccagggatcgaactgacggtaagtttcgttgctcataagccctcctaacaaaagcgatacatcgaaactacagcccattgtaagcggtgaaaccacgcaggagaacgggcaacacacgggtgcgccgtccgcgatatcgacgtgtttcgcctgtttcaccggggggaatggaggattggcgcgtgtcttgtgtcgcaagagtcgaattggtatgctactctcttcagagtgctttggcacgccctcgtatcccaattggtagaggaagcagcctcaaaatctgcgcagtgtgggttcgagtcccaccgagggcactttagttaggagttcgctgaaattattgcgaaccccattgttgggtaattcaagaaagaggttggcatggctgcaaggaagaagtccgaagaaccgagtatcaacatcgatgaggtgctgaccgacgaagagctcaaggccgtggccaatgaaagcgaacctgctgagcacaaggccaagtccgaggacggtccgcgtaccgttgtcgtggccgaggacgaagccgtgaaccgcatggatctggtcgccatgctggaagacaacggttatgaggtcgttggtcaggccgccaacggcgaggaagccgtggaactgacccgcaagtaccgccctgatgtggtgtgcatggatgtcaagatgccgcgtatggacggcatcaccgctgccggcattatctgcgatgaaaacatcgcccccgtcgtcatgctcaccgcattctcccagaccgatctggtgaagaaggccaccggcgctggcgccatggcatacgtcaccaagccgtacgaggaatccaagttgctgccgaccctcgaggtggccatgggccgtttcgccgagatcaacgatttgctggacaacgtggagcgcagcgaacgcaagctcaaggaaaccaccgaccagctcagggaaaccgaagagaagctcaagaaggccgaagacacgcttgaggagcgcaagctcgtcgaccgcgccaagggtctgctgatggacaaggcggacttctccgagcagggtgccttccgttggattcagaagacctccatggaccagcgcatccccaagaagcgcctggctcaggccatcatcgccaagtacggcgatccgaagccttctgattcgggcgaacgctgattatcagcgtcgccgtaccgagtcgtaaagcaacacaaacacactatgggagaggccagcgtgaccgtacccaccaatgaaacattgctggtggtggacggccactcgctggccttccgtgcatttttcgccctgccggtcgacaacttcagcacctccagcggccaagccaccaacgccgtctggggttttgccaccatgctcgcgcaggtgatcgacgcggagaagcccgaccatctgggcgtcgccttcgatgtgaagggcggcacattccgcaatgagatgcttccgcaatacaaaggcacccgtgaggcggctcccgaagagctgctcacccagctgccattgattcaacgcatgctcacggccctcggcgtcacctacatcgagaagccgggattcgagggcgacgacgtgatcgccaccctcgccaccatgggagacaaggccggttaccacacactggtattgtccggtgaccgagacgctttccagctggtggatgacaacgtcaccgtgttgtacccgggccatcacttcaaagacctgaagcatatgacgccgcagtccatcatcgacaaatacaaagtcactcccgcacaatatccggatctggcggcactccgaggcgaaaccgccgacaatattcccggtgtgcccggcgtaggcgacggctttgcggccaagtggatcaaccaattcggttccctcgacggcatttgcgagcacgccgatgaaatcggcggcaaaaaaggcgaatcactgcgggccaatatcgaccaggtcaaactcaatcgcaaagtcaacgcactggtacgagacgtcgatctaggcgtcgatatcgaggatctgacattcggcaccgtggacgtggcgcagatcgacgccctgttcaaggagcttgaattcggacctcgcaccaagagtcgtgtactgaaaaccttcaataccggggccaaggcatccaacacatccggagctggcgagtctacgaataatgagcagaacgagcaggatagcagcctcgatctgaacctgccggaacccacgagcatcactgctccggagcagttcgacgaatgggtcaaggcccatcgcgtcgaagtcaaggttcccggtgaaatcgccgatttcacggtttccgactatggcgatggctcgcggcggcatgccatctgcggcgacgcggtcggccacgcttggaccgtggccgcatggggcgacgaaaggccggggcgtgccacggcacaagccattgccgttgccacggcaacatcagcggccatagtgtcccttccaatcaccgataccctgcgagcacagcttgcgcagttcctgaaaagcgaacactcccgcaccatcgtgcatgggtataaagaattgctgcatcttctgggcgcggtcgatcttgacctggacctgccgatgttcgacaccaagcttgccgggtatctggcccaaccggatttccacgccgatagcctcaagcaggcggccgagcacttcctcgacatccacttcaccgaaaccgaacagccttcgcaaggcacattggacttcgacgacgatcaggtcgaagaagatccgaacgaacttcgtctgcgtgatttggccattatccgcagcctcgccgtcacgctcgggccgattatcgacgagcgtgaacaatgctggctgatgcgcgcgattgaacttcctgtttcccgcgtgctgcacggcatggagcacacaggagccaaagtcgatagcgttcgactcgtctccatgcgtgaccagtttgccgccgaggctcgccaagcgcaggaaatggcttgggagtatgccggcatcgaaatcaacctgcaaagccccaagcagctgcagaaggtgctgttcgaagatatgggtttgaaacccaccaaacgcaccaagtccggctcatacaccacgaatgcggccgcattgcaggatctgtatgtcaaatcagtggacaatgagcgggccaacggtttcctcggagcgttgctgcgccatcgcgagatcaacaagctcaagcagatcgtccaaacgctgatcgatgccaccaacacatcagatgagcgcatccacaccactttcgagcaaaccgttgccgccaccggccgattgagctccgtggatccgaacctgcagaacatccccaatcggaacgccgccggccgtgagattcgtggcgtgttcgtgccgggggaggggtacgaggccctgatgagctgcgattactcacaggtcgagctgcgcattatggctgatctgtccgatgatgaggcgctgatcgaagcgttccgctccggagccgacttccacaaatacgtggcctcgatggtctacaagctgccggtcgaccagatcaccggcgaccagcgcagccacgtaaaagccatgagctacggattggcctatggtctgagcacgtatggtcttgcccagcaactcaagatcgcgccacgtgaagcggaagcgttgaaaaaccggtatttcgatacctttggcaaggtgcacgattaccttgaatcgctggtggccaatgcccgagagaaggggtatacggaaaccattttcggacgacgtcgctacttcccggccctgcattcgaccaatcgtgttgcgcgtgaggccgctgaacgtgcggcactcaacgcaccgattcagggatccgccgccgacatcatgaagattgcgatgattcgcgccgagcagaccttggccgaggctcacgtcaagagccgtatcattctgcagattcacgatgaactggtagtggaaatcgcgccgggagaaggcgaccaggtcaccgaactggtgcgcaacgccatggaacacgccgtcgaccttgccgtgccgctggacgtatcgtgcggcatcggttccgactggcaactcgctgcacactgacaatttctagctcccctcgggtgagggggctgagccgttgagcaaacagtccagtggattgtttgtaggcgaaggcgagccgatagtcgagcaatgaagagcacgagcatggcttgtccgcaattgcagaatgagtcccttgcagcaatagcccactacaatgggacatatgccgaatctcaagcaagtcatcgacgttctcgagaccctgtacccattgcgctacgccgaggaatgggatgagccgggcctcattgtcggcgatctgagtcacgacgtgcaccgcatcgtgttcgccgccgacccgacctccgccatcattgacaaggctatcgctactggcgcggacctgctcatcacccatcacccgttgttcttccgttccgtacacgagacgagcggactcggtttccggggcgacatcgtccgcagactctaccagcacggctgcgggctgtgggtagggcacactaatgccgacgctgcgtatcgcggcgtgggacaggcggcggccgactacttcggactcatcgaccagaaaccactcgtgccgattgacgatgcaaacgcctctcatccggtcggcttggggcgtgtgggtcgtttgccgaagcctgttgccctgaaggatttcgctcagcgagtattcgacgaagtgtccgatcatggcatgaccagcgcgctcggcatccaggtatgcggcgattcggacacttttgttcagtatgtggccattctgcctggctccggggactccctgttcaacgaggtgcgtgccaccggtgtggacgtgtacgtaaccagcgatttgcgtcaccacccggtgaccgacgccatcgaacaagcccggtatgaagcccgtatgagggcccaaggcatcatgctcggccatggaatggcgggggagagccatgtgcgtccctgcttcatcaacacccctcatgccgccatcgaatccatgtggttcaactacgcgatcgatgacgtgccagccgccatcgaacaagcgaccggagcaaggcctgaagtcgagtggttccacgacacgaccgatccatggacgctgtccattgccgcgcatcgagattaagacgctatagtaacgtggcaaaaacgttttttccgaggagatgacatgtttggcggaagcaagcaggaacaactggagcatcggctcgaccataagctgaacgcctcctcggacggcatcgacatggacgtgcccgccaaagtgatcagtagcgaaaccgtttataccgggcgcatcttccacgtggacgacatgcgcatcgctctgaccgacaagcagggcaaggaacatgagatcggccgccaggtgctgcgtcacgccccctgtgtggtcatgctcgtgcacgacatgtccaccgaccgctacctcatcgaacgcgaataccgcgccggatcggacatgttcgcctacgggcttcccgccggactgatggacgagggcgaggacatcatggacgcggccctgagggaactggccgaggaaaccggcgtggtgccggaccgtgacaccatgggcgttgacttcgtaggtgatttctactcgtccgaaggcatgaccgacgaactggcccacatcatggtgttgcatttgggcccgttcaggcgggagcagcgccatttcgatgcggacgagcatgtggaatccgcgtggattccgtggagcgaccttgccgccacgcgcatcacctcatccaattcgatgatcgccatccagcatgaggcgttacgcagactcatcgccaggaactccgacaaggataagccgtcgctgttctcctgacgttcaactccccggcacatcactgacacaaaaaaagtgggatactgaaaactatgcagatcagacctggatcaatgtatccgctgggcgccagctatgacggcgccggtgtgaacttcgcgctgtactcacaggttgcgcagaaagtcgagctatgcctgttcgacgagcacgatgtggaaacacgcatcgaaatgaccgaacggaactcatacgtatggcataactacattcccggcctccatcctggccagcgttacggctaccgcgtctacggtccctatgacccggtgcacggcctcagatgcaaccccaacaaactgctgcttgacccgtatgccaaggccattgaaggtaatatcgacggcgacgaaagcctgttctcatactggttcaagagcccggacgacaactcggcgatgaacgaccttgactcggccgcccacaccatgaagtcggccgtcatcaacccctacttcgattggggcaacgaccagcatccgtacatctcgtaccacgattcggtgatttacgaggcgcacgtgcgcggcatgaccaacctcaacatggacgtgccgccggacatccgcggcacctacgccggcctggcctatccgagcgtcatcgaatacctgaagaagctcggcatcaccgccatcgaactcatgccgatccaccagttcgtcaacgactccttcctgcaggagaagggcctgtcgaactactggggctacaacaccatcggcttcttcgcaccgcacaacgcctactcctcctccggggaacgcggcgagcaggtcaacgaattcaagtccatggtcaaggcctaccatcgcgccggcatggaagtcatcctcgacgtggtgtacaaccacaccgccgaaggcaaccatatgggccccaccctgagcttcaagggcatcgacaacgcctcctactaccgactggtggaaggcgaccagcagcactacttcgacaccaccggcactggcaactcgctgctcatgcgctcgccgcacgcgctgcagttgattaccgattcgctgcgctactgggttactgaaatgcacgtcgacggcttccgcttcgatctggccgccacgctggcacgccagttccaggaggtcgacaagctgtccgcgttcttcgacatcgtggagcaggacccgatcatctcgcgcgtcaagctcatcgccgaaccgtgggatctgggctccggcggctatcaggtgggcggcttcccgtccagctggtccgaatggaatggccgctaccgcgacaccgtgcgcgacttctggcgctcgcagccctccacgttgcccgaattcgcctcgcgcttgatgggcagctccgacctgtatcaggtcaacggccgtcgaccggtggcgtccgtgaacttcatcaccgcgcatgacggtttcacaatgaacgacctggtcagctacaacgaaaagcacaacgaagccaatggcgagggcaatcgcgacggcgagagcaacaatcgctcttggaattgcggcgttgaaggcccgaccaatattccggacgtcaacgacttgcgtcagcgtcagatgcgcaacatgttcgccacgttgctgttcagccagggtatcccgatgatttgcggtggcgacgaagtggcccgcacccagcagggcaacaacaacgcctactgtcaggacaacgagatctcctggaccaactggcatcttgacaaaggacgcaaggaactgctcgccttcgtttccaaactcattcatctgcgtttggatcatccggtgttgcaccgccgtcgcttcttcaccggccgtgagcccggcgacgattcgaacacgattccgcaggtcgaatggttcgaccacaccggctcgatcatggatatggacgactggcagaacacgcatgcgttctccatgatgatttatctgaacggttcggatatcccggaggtcgactggtacggcaaccggatggtcgacaatgacttcatcctgatcttcaacgcgcattacgagccgattatgttcaccctgccggatgagcgatacggccgcaaatggcagctggtcgtggatacgcacaacccgaatgagccggcgctgagctatgaggcgggcttcatgatcaccgcccagtcccgcagcttcctcatgctcatgagcgccaaaaagcccaagaagcccatgggcctataaccagaccgaatttaagctccctctgacgagggagctcccggtgtagccgggtgagggagagaccgcagcaaagccgcgaacccctactcgcgccccttacgctcctccacgagccgagcatcgacatgattcggctgatcagcacccgttttgaggtgccgatggcggaatcctgccatatcagcgtcgaacaggccgaggactgcatgtcggcgctgctgccaaacctcaagcggtggcggcgtcaggacgagatcgatgcggtggcggaaggggaatgagcgatggcgttcgattataagaaggagtataaggacctgtatcagccgaagaccatgccggccatcgtcatggtaccggcgatgcggttcgtcgcggtggacggtgtgggcgacccgaacgaagaaggcggtgattacgccaaggcgatgcaactgctgtacggcatttcgttcaccgtcaaaatgagcaagaagtcaaagaacccggccgagcatatcgacgggtacttcgactacaccgtgcctccgctggagggcttatggagcatgggggagggtgtgcccggcgtcgattacgcgcacaaagccgacttccattggacttcgatgattcgtctgccggaattcgtgaccgatgaggtctttgcgtgggccaaggcatcgtttgccgccaagcatcccgaagtcgacatcaatcgtgcatatctcttcgacttcgatgaaggcgtggtcgcgcaggtcatgcacaaaggcccgtacgacgacgagcccgcaaccgtgacgattctggacggctacgcgcgttcgcaaggctacgggctcgacttctccgacacccgccgccatcacgagatctacctatccgacccgcgccgagccaaaccggaaaatctcaaaaccatcatccgtcatccggtagtgaaggtgggttgactttcggcgaactgctcgaagcgctcaccgcgcagtagcgtgaacaatctgccggaatccttaccggggtcaaagagcgctaccaagaactcgataagcaaaataactagaagcacgggttcctctcggagagattctgcccgagcgaccttataaatccttgcgcgggtcacctttccctgtgcaggaagcatccaggctcatgtgcattgatgacgccgatggattgcagataggcgtagacgatggtggtgccgatgaatcgcatgccgtacgtcttgagatccactgcgatggcgtcggacagaggggatgtagtcatgcctgtctcgtagatgacgcgacggccggtgaaccgccaaatatagtcgtcgaaactgccgtacgacgtctggatatcccggaatgcgttggcattaccgaccgtcgcgacgattttgcgacggttgcggatgatgcccggatcgttcatgagttcggcgatcttgttctcgtcatagcgccggatccgttcgatgtcgaacccatcgaacgcctgacggaaacgcttgcgtttgttcagtatcgtctcccatgacagtccggcttggaaggtctcgagcaccagcatctcaaagaggtggtggtcatcatgcgacggaaccgcccattcggcatcgtgataggcaacatagacgggattgctgagattgcaccagccgcagcgtggtcttatatcgtccatgtgctctccctatgggtcgttggagacggtcggttctagatgttgattcgatgtgtgatccagtataaacggtgtgttcggatagcggtctggatgtgcggattgtctgaaccatatttgccggattgcaggtataaaggggttagttactgcggttgcgggtatttcggtactagttaggggtgattctgggctgtaactcgacaccttttacctgcaacccactcccgcccacgggattgcacaatcggttgcaggtattttggtgtcatttgaggttgggaagcggaaatcgatgtcgcatggaatcgaactgactagcaggtggggtcccaacatcacaaaagtcccttataccgcaaggccatataggttctacggtcatcggataaaaccggataaatcgtttagcggtcggataaaagaagaagcccagaatcgttgagattccaggcttttttgtttgtcgggctagcgggatttgaacccacgacatcctgctcccaaagcaggcgcgctaccaaactgcgctatagcccgatgtgccattaaggcacgaggaatcattataaacgacgctggatacattgcgtgtcgagcatatgaattcaaaaaaggttctggattctcttgatagcttatgagtgacatctttattcattgatgctctacaacgactaggtttggatctgcatcgatatccggcgcatccgctggactaacaaggaccgtgcaaacgatgtggcccccgacttcctgcgaggaagtcgggggccacatcgtttgcacggtggactatcggatcaattctgatcagatcagctcgaggtcgacatcgaggctgatcggcttgtccgccgggatatggtactgggggtgcaccggcgacatccaggaatcatcgccgccaacgcccatctgtgcggcaaggacgcgcaggaacatgtgcttcggcttcggcagctcgtcctggtgctgagcctcctcaagcatgaagctggagtacggcaacaggcttaccgcgaacggcgcggcaccatcggcgcggctgacgcgcatgccgtggccgtgatcgtcggtaatctcggcccaacgcacatcctcatggttgcccgtctcctgcggcatgaggtacggcgcatgatccgcgaaagcgttggtgctccacacgccgagcttggcgtgtttgcggtccaggtacgtctcctccgggccggtgccgaagaacctcaggttcgtgtactgcacaggcagcgtccattcgatgccgaacgccgggatggtgggcaggccaccctgctctccagggtattcgacgtgcaggttcacgcggccatcggtgtgggccgtgtaggagacggtcaccttggtgcgctgcgcggtggcgagctcatacgtgtacgtgcccttgagcgtgctgtcgtcgatctgctcgagcacgttgtccacgcaacgggcgtagcgtccggcgcccaaccactggacgcgctcgaagccatgaccggcaccgcgatcgttgtcggtcagcggacggaaggtggtgattgcgggacggcgcagcacgaactcgttgccggcgaaggtgtaggagaccatgccgccctgggtgcgcgacagcaggacctcgcgtccggcgcctcgcacgccggcgttccaacggcccacggtgatggtcccatcggccggcttcgtgtcgggcgtcgcggtggcgtccgcgggcaccacggcctgtccgaaggcgagctcgtagccgctctcggcccaatcggtcgccttggcgagacgctgcgaaacctgcagcaccagttcgcgggcgtcggcgcggtacgccgccaccggccatgcgacatcgaacgtgcgggtctcaccggccggcacgtcgaaacgccgggtggactgccagaccggcttgccgtcggcgagaacgctcagaacgaacacgtagtcgccggtggcggtgaacaggttgtcgttcttgacggacaccgaatccttcgtcacgtcgatgtggacgttcgagtacagctgcttgacttcctgggccttgggggaaggcttgcggtcggcgaacagcaggccgtcgccggagaactcgtagtcggacggacggtcgccaaagtctccgccgtagcgcaggctcctggtgccgtcgggctgggtggcgtagatggcctggtcgatgaagtcccagatgaagccgccctgatacttcgggtagcgttcgagcgccgtgtattcgtccatgttgcccacggagttgcccatggcgtgcatgtattcgcaggagaggtacggcttcttcgggtcgtccttcaggtacttctcgatctcgtcggcatgcgagtacatgcgggtctcgatgtcggtgacgtcatcgtagtcacggttgtgggtcacgccctcgtagtgcaccggacggttcgggtcgatgtcgtgcacgtgcttgtacatggcgcggaacacgtcgcccacgtaggattcgttgcccagcgaccagatcagcacgctcgggtggttgtagtcgcggcgcatcatgctgttgacgcggtcgacgcaggcgccttcccattcgcgcttgctgcccggcacgatggtgtcctcggtgaggacgtctccgggcagggaccagctgccgtgggcttcgaggttggtctcgtcgatcaggtagatgccgtactcgtcgcacagttcgtaccagcgttcctggttcgggtagtgcgaggtgcggatggagttgatgttgtggcgcttgcagaagaccacgtcatcgatcatgtcctgctcggtgatggcgcggccgcgttcggcgtcgaactcgtggcggtcggcgcccttgaacacgatgcgcttgccgttgatggtcaggatgccgtcctcgatgcggaagcggcggaaaccgaccttctgggacgtgcattcgatgacgtctcccgcctggtcgatgacgtcgacgtcaagctcgtacagcgtcgggctttcggcgctccagggttcgatgccctgcagcggcccgctggagatcgcggtctgcgcctccgcgtcgcccgtcgtctgccacaccgtgttgccgtcggcgtccttcagggtcgcgcggaccgtggccgcgtcggccgcgttgagcacggtcagcgcggcatcgagggaggcggtgccggcctcgggatcccaatcggcttcgatctgcgtgttctcgatgtgcacatgcgggcgggcggcgagttcgacggagcggaacaggccgtgcagacgccagaagtcctgatcctcaagccaggaggcgctggagtattcgtagcaggcgacggccacgacgttctccccgtcgtgcagcagcccggtgatgtcgaactcattgggcgtgaagccgtcctcgccatagccgacgaacgcgccgttgacccacacgtagatcgccgtggccatgccgtggaacatgatcgacaccgagccgccggcctgcttggcgtttgccacgggggcggagacggtgaacttcctgcggtagagcgcgacgtgattgttttccgggatgttcggttccaacgggttctcgtggccgtcccacggatactggacgttcacgtacttgtggttcatcagaccggccgtctgcaggtggcccggaacctggatacgctcgaacgaggagtcgtcgaacgactcggccgtcgcgggttcctcttcgaggttgatgtcggcggcctgaacgacctcgacccgccactcgccgtcaaggctctgcttgagatcggaccattgtccgctctgggggtcacgggcgtaccacttgtggctggaatgggccggagtccggttcacctcgaacaccgtcgggtcggtcagccaagcctgcgatgcgcgatcgacatgtgtgacgtctgccatgctctcctgctttctgtcattacctcgttgtgaatgatattatggaggaggtcggggcctcctttaccgaaaagaataaacagtttttatataaaacgcaaatcctgtttaccgcttccaaatcactggcactgcttgccgtcgacgctacgccgcgtccatgcaatgtctcggttcagcgcatgttatctcatccttgcgacacgctgtttatctccttgtttactaatgctttttactttcggtgataaaacttgtatgcttactttataaaatcaatgagtgattccatgctccggattcttaaggaggagactaatgagcaacgaaaatgccgcggtcggcgacgtccgcaggaagggcgggctcggccagcgcatcgcttacgcgtgcggcaacttggggcaggctgccttctacaacgcgatgagcacgtacttcgtcacgtacgtcaccagctgcctgttcgtcagctacagcaaggctctcgccgcccaaatgatcgccgtcatcaccggcctgatcgtcgttatccgcatcgccgagatcttcatcgatccgctgctgggcaacctcgtggataacaccaccaccaagtggggccgtttccgcccgtggcagttcatcggcggactggtctcctccgtgttgatcgtgctcatcttctccggcatgttcggactggtcaacgtgaacaccacgctgttcatcgtgctgttcatcatcacgttcatcgtgcttgacgtgttctactccctgcgtgacatctcctactggggcatgatcccggcgttgtcctccgactcccacgaacgttccacctacaccgcccttggcaccttcaccggctctatcggctacaacggcatcaccgtcatcgtcatcccgatcgtcagctacttcacctggacgttcaccggcgccaagggccagggccaggccggatggacctccttcggcttcatcgtcgcgctcctcggcctgattaccgcctggaccgtcgcctttggcaccaaggaaagcaccagcgcgctgcgtgccaaggcccagaagaacggcaacccgttcgaggcgttcaaggcgctgttccagaacgaccagctgctgtgggtcgccctgtcctacctgctgtacgccatcgcaaacgtcatcacgaccggtgtgatgtactacctcttcgtgttcgtgcttgacgagcctgccgccttctccatcaccggcatcattccgctgatcgccggattcatcatggcgccgctgtacccgattctcaaccgctggattccccgtcgctacctgttcaccggcggcatggtctccatgatcatcggctacacgatgctcgccctgttctccagcaacctgccggtcgtcatcgtcgccctgatcttcttctatgtgcctgcgcagttcatccagatgaccgcgattctgtcgctgaccgactccatcgagtacggccagctgaagaacggcaggcgcaacgaggcggtcaccttgtcggtgcgtcccatgctcgacaagatcggcggcgcgatgtccaacggtgcggtcggtgccgttgccctcgcggctggcatgaccggtcatgccacggcagccgacatgaccgcgtccaacatcgccacgttcaagaccttcgccttctacgtcccgcttgttctcatcatcctcagcctcgtcgtgttctggttcaaggtcaagatcgatgagaagatgcatgcgcagatcgttgaggagctcgaagccaagctcgcttccggcgagatcgtcgacgatgaggcgcaggcagttattaagaactgatctcccgttcccatccctcccataaggcccgtccgcctgaaccgcaagatgcggtccgtggcggacgggcctgttcgttcctgcggtcggcggtcatgaacatacccatgtcggttccggcagtggggccggaaccggcggcgtgtcgactatcggccaggagtgtctatcagctggtatccgatatgggccgtggccctgcgccgcctgccaaaggagataaccgtgcgtgcatgacgtgacttcgtatggccaaaactgctgaccgcggacggacgcggcatcgctttcggtggcgactatagtcccgaccaatggccggaggaaatctgggatgacgacatccgcctgatgggccaggccggcgtcaacaccgtggcccttgccatcttcagctgagatcgcctccagcccatcgaagaccattgggatttcgactggctcgatcgcgtcatcgacaagctcggtgacgtgaccgtcgccggaccgcatgtgcaggtgcttgcctcgtatgccggcgaagaagcggatgagtgggagcttgacggcatggccgcgatcacccgcaacacgtacggcgaaggggaggcgtatttcctcggctgcgatctgggcgtgagcgatctgacgcgattcgtgggaggctggcttgccgcgcagccgcaggatggccggcagccggaagccaacctgcggtcgcccgccagcggcgtgacctctgacgttctgcacaccgtgcgtcaatccgacgacgccatattcgacttctatctgacacgtggcagatcggatgtcaaactgcgcgacatcgcaggggagccgatcgtcctgttccgggcggaacggggcagtgacggcggcgcgtatacggtgcatcgcaatggcgttttcgtgacgaagcccccgaacccgtcggtgtagtcagttgcgacgaaacaggagggcggagccgcggacggttttgtgagacggtccgcggcctcaccgttggaagccgcggactcggatcatcagcaacggacgcgccgttgatttccacttccggagcaacgatggtgagctttgccgcgacgagatgctgcaggacggtgccgacgtacatggtgcccggattctcccttcgccgctgcgctgcctgccgcagcagatgttccacggccgcatcaacggaaagcgagttgtcggactccagcttgaatggtttgctggtgaagaacgcctgaattcgtttgacccagtattgctcgatctcggtgaattgctctgctgtcggacgtaattcattgatgagctcggcatagtcatgcatcagcgccatggtaccgcggctggttcgtcccttaaaggttgaaccgatagaaccgtcattcattactttttcaacgatactgacacgctcattcgattgtgtccaatactgctttctttctgcatgaacaacggtactcggcaaggcggtaacgatagtcgcaaaggctaagaagcccgtacataatcgtttttttgtagtgtttcagattttcagtagaatggcgacagccaaatcccgctggcttgctagtaaagcgttgtcctcggggggagttttgtttgttgttgaaagataacgcggcatcgaatagataggggaggcccggcatgggacgtcatcagcgtgcagaaacctccggactcatctccttcttgatttgcgccgtcgttggcgcggtatcgatgaacctgtacatggaatacgcgccggccatctggcagctgacgcaacgccgattcatggtatgttcgggcatcgtggcggcatgcggcgtcatttccttcattattggctatgcgcgcaaatcacgttcattgaacctcaaacatggttggtttgcaccgattcgtcgcattttcgaaatcgtcgccctttcggtggtgtatgcctcgaccattttcctgtcgtcttttgcactcatcggtgcggccaacgacatgatgggcaatgccatcttctccggctatatctccagcgtctgcgccgccttcgccggcgtggtggggtacatgacctttgtacaggcggagatgatgaacgccaaaactattgccagtctgttgccgttcttcgtcatctccggcgtggtcaccgccggcatgaccaccgacgacccatactggtatcacaacaacttttcgcagctcggcgacagaaccacgtttgcggcccgtatgttcaactccacgctgattcttgccggcacatgcatcatcatcgtcagctacttcgccatctccgaactggtgaccaccgaacggctacagcgcctctggcacgaccgcaccaacagagatccgaatcgcggctacgaaatcccacatttcatgctgcgcatctccattctgtccttcctgctgatggtggccggcctggcattcatcggcatcggcgtgtttcggtacacgccacacaatctcttgcacaatatatgcgccaaaggcctgccgttcgtcatgctgctgctgttcgtgctcctgccgtggcttgcgccacgcctgtccaaagcagtgatggtggcctccgacctgaccgcgctcgtatgcgctgcattctgggtcaatatgatgatgggtcacaacaccctcaccaatgtggaggcgttggctggtctggcgttcctcggctggttcatcgtgttctcgcgccagatcgccgccatcgaggccgatcgcgcggccgctcagttgctgcacgcgcaggccatcgaaggcggttttgagcagccgtcttccgcacctgatcagcagatcgaatcccgcatcgctgccgaccggtgaataatttgtttgatagatttggccttatgactgaacgactcacgaatctctggcctgccccgctcgccgcacagccgttgaacgctacggtaacggtgccgggcagcaagtccctatccaaccgctacctgattctcgccgccctcggcagcaagcccgttactctgattggcctgctgcgttcgcgcgacacggaccttatgatgggcgcactcgaagccctcggtgtccgctgcgacgtggattccgcaaccgacaccaccgtaacggttactcctcctgtatccggccgattccatggcaacgtcaatgtgttctgcggactggccggcacggtgatgcgtttcgtgcccggccttgccctgtttgcagatggcccagtgaattttgatggcgacgaacaggcttatgcacgtccgatgaagccggtgcttgacggtttggaacagctgggtgcaacggttgattaccacggcgaggttggccgtctgccgttcactattacgccgcctgcaaccttgccggctgcccaggcgcaggtcagcatcgattcgtccggttcttcccagttcatctccggcctgttgctgattagttccaaactgcctggcggtctgcacctcgcgcacacgggggagaagaccccgagcctgccgcacattcgcatgaccgtggccgatgtgaccggtgccggcggtgcggttgaggccgacgaatccgcccgcacatggacggttgaaccgcgcgcaatgcaactgtcgagcaaggtgaccgttgagcccgatctgtcgaacgcggcgccattcctcggcgcggcattgatcgccggcggcacggtccgggtgcctcattggcctgaaaccaccacccagccgggcggcctgttgcccggatatctggagcagatgggtgccgaagtatcgttcccgaccatcggcggcgtgcgctattgcgaggtgaccggtgacggcaccgtgcgtgggctgggtacgttcgatttgacggcggccggggagattgcgccctcgttggcggcgattctggtgtttgctgataaatcgacagacatggttggtattggtcacctgcgcggccacgaaacgaatcgtctggaggcattggtcaacgagattcgtcgtgttgggggagcggctgaggaattgcctgatggattgcgtatcgaaccggtgccggcggagacgttgcacggtgccgtgatggaaacctatgctgatcaccgtatggccacgttcgccgcgatgctggggctgcgtattcccgatatcgaggtcatcaacgtggccaccacgcgcaagaccttgcctgatttcgtcggtatgtggagtggcatgctgaggcagtaaggggtcctgtgttctggtggaactcccctcagtccgctacgcggacagctcccctcagagaagggagccaagttatagggcctggatcccctctctgagtggatctgtccaccggaggcgactgaggggagtatgacgcgggggtagtggtctcatgaccatatacgaatgggggctgattccaatcggaatcagcccccatagtgttgcaactagagattggtgagatgcctaacggcggttacttacttggcgaaggtgttgccgtaggtgtcggtgccggcttcggcgattgcggcggacttgcgggcgatggccagctcttcgttcgtcgggatcacggcgatgatcacggaggagtccggagtggagatgatgcgcggttccttggagcgggtggcgttcttctcctcgtccagcttgacgccgaacggagcgagcttgtcgcacaccatcttgcggaccacgtcgtcgttctcgcccacgccagcggtgaaggtgatcacgtcgcagccacccatctggtaggtgtagttgccgatgtagctgacgatgcggtgcacgtagacatccagagccagcttggcgtcctcattgccctcggacaccagacggtgaacctcacgcaaatcgccatagccggtcatgcccatcatgccggaacgcttgttgaacagggcgtcaagctcgtccacgttcatgtgggcgttgcgaatcaggtggaagaccacagccgggtcgatgtcaccggtacggccacccatcatcaggccctcaagcggggtcagacccatggaggtctcaaccggcttgccggagacctcagcggaagcggaagcgccgttgccgatgtgcaaaacgatctgcttcaggccttcagccggcttgccgacgacgtccggcaccacggaggagatgtactcgtgggaggtgccgtgggcgccgtagcggcggatgtggtactgatcggcgatttccttgttcagcgcgtaggtgctggcggccttcggcagctggaagaagaaggaggaatcgaagacgaagatctgcggaacgtccggcagcagggagcgcatgacttcggcgcccttggcctccgggccgttgtgcagcggggcgagcacagccagatccttgacctggttgatggtcttgttggtcacgagggccggcttcgggaagatggagccaccctgcaccacacggtggccgacggcgacaatgccagcctcagacaggttcgggccgtactcctcgaagaagccgagcacgcgcttcagaccctgctcgtggtcgtgaatcggctcttcaagctcgtgcttttcgccgttgtactcgtgcttgtagtggccgtcgaccggctcaccgatcttctcgacgaggccggaagcgaggccttctccggattcgagatcaaccagctggtacttgatcgagctggagccggaattgatgacaaggacggttttcgccattgtgggcatcctccattgtgattgaatgttcccgtgagacacgggttaccgttgattagattactcgttgcttgctacaaaataggcattacggtggctcccgctggcgggagccaccgggagccaagccgggctcactgcgcttcgatggcggtgagggcgatggtgttgatgatgtcccgcaccagagcaccacgggacaggtcgtttaccggcttgttgagaccctgcagcaccgggccgatggccaaggcgccggaggagcgctgcacggctttgtagccgatgttgccggcgcacaggtccgggaagacgaacacgttgacgtgtccagccacatcgttgcccttggccttggtggcggccacggtgggggaccaagcggcgtcgaactggatggaaccgaccaccggcagatccggagccttctccttgagcagcttggtggcttcctcgaccatgtccacgtccggtcccttgccggagccgagggtggagtaggagagcataccgaccttcgggtcgatgccgaaggcacgtgcggtctcggcggactgcagcgcgatttcggaaagctgctcggcgtccgggttgaggttgatggcgcagtcggagaacacggccacatggtccttgaagcacatgaggaatgcgccggagaccagcttctggccgggcttggtcttgatgacctgcagggccgggcgcacggtgttggcggtggagttcacggagccggagaccaggccgtcggcgtagccgagcaccacgagcatggtgccgaagtagctggcgtcggtcagctgcttgcgggcctgctcctcggtcatgcccttcttggcacgcaactcgcacagcttggcgaccatgggcttcaacacgttctcgtcgtccatagcctggaagcgggcgcgctccaagtagttcaggcccagttccttgccgcgagccagaatggcgtccttgttgcccacgatgatgaggttcacgatctcgcgctcaagcaggtagtcggccgccttgatgatgcggtcctcctcgccttcgggcagcacgatggtcttcttgttgctcttggccttgccgagcaggccgaactggaaggcgtacggggtgatgggcgcggtgacgtccacatcgagcgcggcgagcacttcatcggtgggagcgttcttacggaaggtctccagcgccagatccttggtggattcatcggtgaacggcacctgcggaagagtccagaccggcaggccgtacttggcgagggtctccttaacggagaaagcgtggcgcggctcgcatccggtcacgaagatgccgagcaccttgttgccagcggcctccatgccctcgatggacagcttgacggtctcgtcgagctcgtgcggccaacggtcgatggtgcacacggctaggaacacgccggccttcagatcagcggcgacattcgcgtcgaattcatagctggtcggatcgttgacgtgggacttgtcggtgcccacgatcagggcggcgtccgcgcgggaaacgtccatggcatcgttgaacgcgccgacgatatcgccacgggcggtgtccttatcctcgcgcaccttgtgcacatcgaggccggtggacagggccacgccgagtccggcattggaggcggcgagcaggatcggggtgaattcgtcatggttggacacagcagggcggaacaccatggtcttgtacttggaagtcaatgcgttgagcatgccgtaagcgacgacgttgcggccattggcgccttcagggctggcgatatatacacgggtgacggtcacgatgtttttgtctcctttgatgatcaacacgatagggaccacacctcattgtagtggcgattactgttatcgctcacgccggtgtcgcgccaatcggagagcgtccccttggcgacgctttccggggaatgttgcgcaaaaccccaaaagtcggccgataggccagaaaacgagaaaggccggtgcgtgaagcaccggccttgattgtggagctagggggattcgaacccccgaccctctccatgccatggagatgcgctaccagctgcgctatagccccgagtgaagctatccgattcatgggagtcgcaagacccgccatgaaccagcggagaaaccaccatatcgcctgatttgatggcttcgtcgtggagctagggggattcgaacccccgaccctctccatgccatggagatgcgctaccagctgcgctatagccccgttttcagttgttggcccgttgtttggacctcgtatacattacgacgagatgtcgattctggcaaaagccggcgtgtcgccaaatgacaaaagtgggatttggcgacactttttggcttgtttccgccattattcaggtattgggttattcaattactgcttgaacggtttttcgaatacactgaacctgttggctcagcaggggagccgtgacacgatcagcgttcgcgttcccactcgtcggtgtcggcgatggccggaccgtgattgtagtccagcagacgccagcgcacagtgccatcgggattgtccatcggcaccaagcgcacccagtgcgcattacgcaatgaaaccaccgtggaaaaggtcggatcgattgcagaaatgcccaacagggtctgcaatgtctgcgcaatccatgcgccgtgcgagaacacgaacaggtccgtgtcgtctccggcacgcgtggaccagtcctcaagagcctccacgccgcgcttgcccacagcttccttgggctcggctccatacttcagctcgccgccccgagactccatccaggaacggaagtcctcggggtagcgttcggccagttcggccacggcatggccatcccaatcaccgaagctgcgttcacggacgcgacgatcatcgacgggctcgattccacccaatacgtcggcgaaagcttgcgcggtggcgtgcgcacgcttcaaatcggagcagacaatgaaccggtggttgatttccggccgacgatcgacgtacaggcttttcaaggccgcggcggtctgcttgacctgccattcacccacggcgtccagcggaatgtcgacctggccttggagcttgtgagcggcgttgtaggaggtacgtccatgacggataaggaaaacggaacgaacatgattggtcatagtgacgatcctttcggttccagtgaggaaacaggaaaaaggggagggctgcctggtgccgtcaatgacgttcggcaacaggcagcccgacacgcgaatatcagcgaatatcagcgaatatcagcgaatatcagcaagtatcagcgttacgcgattcgcacgttacgcggtggtgacggcagcatcttccgcatgctccgccgtttccgggtgtgcgagttcaagatcgatggccgggcagtcgcgccagagtcgttcgagcccgtagaattcgcgcgattcctcgtgcatgacatgaaccacgaaatcaccgtagtcaagcagcacccactggccctcggtcaggccctcgcgcgagcgtggctggcggccggagcacttaaggaacaggtccttttcgatttcctcggccacggccagcacctggcgctcgttggaggcgccggcgatcatcatgatgtcggtgatgccgagcaggtcggctacgtcgaaggccacgatgtcggtggctttgatacggtccgcggcctcggcggccacgcggacggcgttgatggaatcctgaagtgcgggcatggttcagcgctcccaggcgggcttccagccctcgacgttgtgttgcgtattctcggagtagaccatcgtgtcgctcggcacggcgtggcgcaccacggaaccggcgccggtggtcacattgtcgcccacttcaaccggggccacgaacaggttgccggcacccacgtggcagccggagccgatggtggtgctgttcttgtgcacgccgtcatagttggcggtaatggtgccgccgccgatgttggtgtggtcgccgagctgggcgtcgcccacgtagctcaggtgcggcaccttggtgccgttgccgatgtgcgccttcttcatttcgacgaacgcgccggccttggcatcctcgccgaactcgttgcccgggcgcaggtaggtccacgggccgatgttcgtgcgtgcgccgatgtgcgattcctgtacgcgggaacgctcgaccacggcaccttcgtccacggtcgcgtcgatcagggtggtgtacgggccgacgatggcgtcctcgccgaccaccgtgtggccttgcaggaaggagccgggcaggatggtggcgtcgcggccgatctggacatcgtcctcgatccaagtggtttccgggtcaagaatggtcacgccgtcgcgcatccagcgctcgcagacgcggcggttgtaggtcttggacagcgcggccagctgcacgcggtcgttcacgccttcgacggtgagcggatccggagcagcgaacgcgccgactttgccagcggccttggcggtttccagcgcgtcggtcagatagaactcaccctgcgcgttgttcgacttcagtccggcgattgcctcggtaagcacggaagcctcgaacacgtagactgaggtgttcacttcctgcacggcgagttcgctgcggttggcgtctttctgctcgacgatgcgcagcacgttgccttcgcgatcgcggatgatgcggccgtagccggtcgggtcatcgaggatggtggtgagcacagtggcgccgttgccggaggcggtgtggaattcgaccagacggtgcagcgtctcgctgtcgagcagcggcatgtcggaggcggcgatcagcaccgggccatcgaccttgccagcctcggtgagctgcgccattgcgcactgcacggcgcggccggtaccgggaatgtcgtcctggttcacaatggtgacctgctcgtcataggagcgggcggcttcggcgacgcgctcggcctggaagtgcacgaccacggccagcgtgtcgggattcagggcggccaccgaatccatgaccctgttcaggaaggtcttgcctgcaaaagcatgcagcaccttcggcttgttggaacgcatgcgggtaccctcgccggctgcgaggacgatggctgcggataatgccataactgacgtattcccttcgatcggaatgtctattgagggtggaaacacctcaaaacaatagacggccgcccggatgtcgagcggccgtcagccgttcccccacctggactcgaaccaagacaaagggttccaaagacccgtgtgctgccattacaccatgggggagtcgtgggctttcggcccacaagtgttcatttataccatattgtcggtatttaccgaaagactacgccatgtcgcgtctcgcatcgtgtgctttccacgaacaaacacgcacgtgatcaggcgaacaggaagccttgaccgtggtgctcggggtaggtgtcgaacagttcggcgaccgagccgtcctcgaatacggcgcggatggcgctggccagcagcggggcgatcgacaggacggtcaagccatcccagcgcttttcctcgggaatcggcacggtgtcggtcagcacgacctcgcgcgcaccgcagttcttgagtcgctcgacggccgggccggagagcacgccatgcgtggcgaccacggtcaccgacttggctcccgcgtcctgcagcacgtggcatgcgcccgcgatggtaccggcggtgtcgatcaggtcatcgacaagcacgcagtccttgccggcaacgtcgccgaccacacggttggcgaccgcctggttcgggcgggtgatgtcgcgcgtcttgtgcacgaaagcgagcggaccgccgccgagacgctgcgcccactgctcggccacgcgaatgcggccggcgtcgggggagacgacggcgacgttgtcgagatggccctggaaacgatcacggatgtagtcgaccagcactggcatggccaccagatgatcgaccgggccgtcgaagaagccttgggactgcgcggcatgcagatcgaccgacatgatgcggtcggcaccggcggtcttcagcaggtcgaacaccagacggcaggagatgggctcgcggccgcggtgcttcttgtcctgacgggagtagccgagcaacgggcagaccgcagtaatggaacgggccgaggcgcgcttcaatgcgtcgatcatgatgagctgctccatgatcgccttgttgatgggcttgtagtggctttgcagcacgaacacatcggcgccacgcaccgattcagtgtagcgcacgtacatctcgccgttggcgaaatcgtatgcggtggtttcaaggacgtcgatgccgagctgctcggcgacatcctcagccaacttcggatgaatccttcccgtaacgagaataagattcttatcgggctttccttcaaggattgcgctcaccatgtctcccaacgtgtggtctcgttgatgcagtcttcagcatagccgttcttcacgaccggttggacaactcagcgttgcctgccgttcacctgccgcttgcgatccattgttcgatggtctgtctgaccgcctttgcatagatatcgctatccatgctcgggtggatgccgtcggagccgagcacctgcgcgttcgcgttggctgtggcatcccaatccaccagcaccacattgtccggatgtgcggccgcatagtcggcaagcacctggttggtaggtggaatccacgtacggtctccgtgggcattgaccagtaccagcacgcggtcggggccgatcatattacgaatctggtccaactgatcgggggtgattgccgaattggtgccaaggccgatcaacacccactgccgcagactgccggcggacagagcgttgccgatgagttcgggggcgaccatgatggagcgggaaacgctcgcgtcggtctgaatgccggggaagacttccgaaaggccctgtgatgaggccagcatcaccgaatcgcctatggcggtaatctgatcgccggtgggcatctcatgcttgggcttgggcggtgccggcacggcatggcgcagcagcacgtgttcggttttctgcatacgttccagttgtgcggcctgttgctccagctggatctgcatggcggttttcgcaggtgcatgagcaatgccctgcacgcagccggccaacgacagcaccaggataacgtcaacggcaataacccgggccacatgattcttcttgttcgtgcgaaggggcaccacgacggataccgccgagtgcgttgccgccggtttctccaccatcagccaggaaatcatcaccgcaatggcggtgagcaacgcggtcatgatgagaggccaaggccctactgccttgaagatcttcggggcaagggcgctggaaagaatccacaacggccagtgccacaggtagatgccgtacgaatacttgccgagggaggccaatggcttgaacaccatgaggctttgcatccaggaatcgtcggagatggtaccggcaatcagcagcacggacaacaagctggacaatatgatgccaccgcggaaggcgaatgcatcctgtttgccgataaccgccatggtgaccaaggcaatcaggctgaggaacgccaataccggtgccgccgcattccagatgcgatgctccacgggaatctgaggtaacggagcccgatgtgcggctgccgaagcgctcgagctaatggtgcggggcatcggcacagccctctggcgagcgtggcccaactgaggagcggtgacccaccaggcgagagccacacccagcatcaggcccatgctgtgggtatcggtgccgaagtagacgcgggtggggtcgcctttgggcacatacatcacccacatggcgatactgctgaacgccgcgagtcccagtgggatgagtgaaggcagtttcgtctggcggagcttccacatcagccagacgatgaacggcacgatgacgtagaactgcatgagcacgccaatgaaccacagatggcgaaacacctgcgggttcatttggtcgaaatagctttggcctccggcaatggcgtaccagttgtagcagcccagcagcacggtgatgacttggtcgcggatggaaactagaatgtcgtgatcgaacagccagccgacggagacgatgaccggaatcagcagaaacagcgccggatagagacgtactgcacgcttgggaatatatcgcacgagattcagcgatccggttttcgccagagaacgaatcaaactgacggcaatcaggaatccagagacggtgaagaacacgtcgactccgtagaatccgcctggcagccgttgctgcatgcagtggtacagcacaatggctatcagcgctagtcctttaataccgtctaaacccacgaaccgcttcacggataatccttctctttccgtagtgctgatggcattccccgttctctccaacaaacggaaaacaagcccagcatggccgaggggagagacaatgcgacagcagcgaatcgtcaggccgcatgctgcatgattaccggcttgacgattcacggcataccgcgcttatcggtggcgcttaccggtgatacagactcacccgttcgtacttcggttcgcagcacacgttgatgccgagtttgcgatacagcgcctcgtccgtggacgagatgataacggagaagaaggcgtcgcagccctgcaactgtttgagcccgtcgatgacgcgagcggccacaggactggtggcgctggtgattgacaatgcaatcagcgtctcatccgagtgcaagcgtcggttcacgctgttgagatgttcggttttcagccgacagatgggttcgatggcggcatcgtcgattaccggaatggttccgtcaacaccggtgacggccttgagcgcgtgcatcagcagcgcgctggccgcgcccaacaggtcgccggttttgccggtgaccacatggccatcgggcagcaccatggcaccagccggggcaccggtggcggcttccttctcaagggccacggcgcgggcgggagaaagatcgggggtcacgccggcccggttcatgatggagcgcagccgctccacctgttcctcgccagtgccggtgcgcttcaagtgcacggcggcggcgaagtagcggcgcacgatttccagacgcgcggcatcgcggcaggcatcgtcgtccacaatggcgtatccggccatgttgacgcccatatcggtggggctggcgtacgggctttcgcccatgatgcgctccatcatggctttgagcacggggaatgcttcgacgtcgcggttgtagttgacggtggtctcgccgtacgcctccagatggaaggggtcgatgatattggcatcgtcgaggtcgacggtggcagcctcgtacgcgatgttcacgggatggttcagcggaagattccagatggggaacgtctcgtatttggcgtagccggcgtcgatgccgcgctggtgctcgtggtagagctggctcaggcaggtggcgagtttgccggagccagggccgggcgcggtgaccacgacgagcggccgggtggtctcgatgtactcgttcttgccgtatccgtcgtctgaaacgatgcgttcgatgtcgtgcgggtatccggcgatcgggtagtgcaggcggcaggtgacgccgagttgctcgaggcggtggcggtaggcgtcggcggcgggctgattggcgtattgggtgagcactacggagccgacgaggaagccgcgggaacggaacacgtcgatgagtcgcagcacgtcttcgtcatacgggatgccgagatcgccgcgggtcttgcctttttcgatatggttggcgttgatggcgatgacgatttccacatcgtccaccagactttccaacatgcggaacttggtgtccggctcaaagccgggcagcacgcgcgaggcgtggtagtcgtcgaagagcttgcctccgaattccagatagagtttgccgccgaattgcgcgatgcgctttctgatgttggcggcttgcagctcgatgtatttttcgttgtcgaatccctggcgcatagaggtcggcatccctttccgaacgacgtcgtaaacgaaaaaattataccggacgtcgtcggcaacaaaaaatgggattccccgatggagaatcccattcgtcatagagagcaattactcccgaggaatgttgaacaggggtttgcatggctcccaaaaacgcgctggttgaaacgttgccgacgacgcgtgcgctcgaagagtatgcacgggtggctttgcggtgatttcccagaccgttcgttgctaggcgagatatttctttttccaggccttctttcgggcgtaagcgttttctgtcatgtcggagtagtcgtaatcaactttgaacttgccgttggaatggagaataagcgtcatcgatccccatctcttttcgggcttaagcgcggccctttcaggttcaatgaacttgttgatacccataaagtttttcatcaaggatgccctcgaaacgcctttttggtcaaagcatttaacgaagtcgtcttttccgctgccagcaacgtaatactcaatagagaacgcaccctcggcgtactcggcgtaaaacacgaccttgctccagtcttcggggagggtttcctcaagaattgaagctatcccttgtagcatcttcttttcactcattacatttcctttgtagtgttaagaagaaacgtaaccgtctcttcgccgtcaataatgtccgtgatagcaaacgagctaggcctgaatgacccgccctcataaagtggctcaaccttgaaaaacacttcagcgccatcagccaaagcatcggcgcatttttgctcgattgctgcataggctttttggttaacctcgccgcccatggcgacaatattctcaaggccatttgatccattgaatcggtcggcaatcagatggcctctttgatcaaaaagctcttcaaacccttttccgattgactggatagtgtccttgatggtcaaacgaccttcgtgggtctttagttgtaagaagccttcggccgattcgaccctacccattgcatcggtaacgtatttatacccattgatctcatagctcatgttcggaacgaggtcgtcgccaacgcggtaaagttgcccgagatcgtcggttgcacacttcacgccgtcgatcgcaaactcgttattgggaagcagtcggtcgccttcgtaaattgcctttccggcatcatccagaattcgtgagcttgcgcccgattctgctgcctttgaggcaagaaagttatttagacctcgtccggcaagaagcgttgctgccgtaacagttcccgcaacgacttctccgacgatatccccctgagatatctcaccgtcttcagcgccggcttccaagctctttcccatttcgtcaagaacgagtacagacccagcagtgagtgctgcaggggcagaagcggtgacggctacggcaccaagcgcaacttcagtggcgatttcgcctccagtttcgacatagtctccgatttcccgtatctgctcatcggcttccatgaagtcgccccaggcgttggctgcatcgtcaacagcgtgtgtttgcgcggttttcaccgctgcttcttcgtcttcggccagtagttcaatattcgattcaacaccgacatatgcgttttctccaacgtcggcaactccaagtacgaacctgccgccaagataagctccgttccttgcgccatcgcggacagtttcgcctgcagcgttgagtgttggctcgcacgctttccaggcgtcatctgcggcttcttgaactgttgaaatgctcgcggttaggacatcgccggaagaaatatcccgccatgcggcatctgcacaatcagcaacggtgcgttgcgcctcctcaaaggccaatctcgtttcggtcgtatccggcattaattgctctatattttcaaacgccatttagatcaccggccttgtttgagataagaccgctgatgcttcggcgagtgctgaggccttttccgttgtctcgatgccggtacccctctttctcagctcgttgagatgagcgttaagcatcgactgaatgaacaggtattggattggtccccagctttcgggtgaggagtcatcttcgaatttccagcttgaaagcagatgggagcaaagcctctctttgaggctgtcggcagataaatccctggcgtcgtcgaggatgcgtccaatattgaaatacctataagcacaccattcaaacagtggcttcctcgaggacagaggagtccctgccatctcaatcaagcgtgccttcatggagtcaggtatgtccatcttgtgcacacagtcgcagaagttgtattcccttggctcatcgagcttgaacggattaagcacacaagagttgagatagcgaagctcttcagaagaaaccttgtccttcgcgctgtgcttgctctgtgttggcgagtactctaggccgcgttcatgcggttcgatgtgacagaggacaggttcggtccattcgttctgatatattgctgcaacgcctcgctgaagatttgcaagctcttggatttggctctcgttaagatttgccgccttgctgacaagcatcctgtcgccttcgtcaggcagtttccaggataagtcgatgcgatgattctgcctcaagcccagcgggttgttaagacgcggtcattttggcgcttacatctcacttttgcagacgtagaatacgggtattggaatcataggagggttctcatgccaaatatcggtaaggacgaccatccgaagctgtggtcgcttattttcgtgcttatcatcgcgctgaccttctgttgcttcgtcatgggccaaggactcaacagtggaaccagcgtcttcctggcaggccaaggttacggtgcgagccttgccggcgtacttgcactcgtcttctccattgccgccgcgttagcacgactgttcgtcggccctgttatcgacaacggcaagtgctcactcgttatcatcgccggcatcgctatcctcatagcaggaacagcactgtccgctgtcgttcaaggcatccccctcttcacaatcagccgtttgctgcaaggcgtgggctttggcgcagcaacaacagcagcctcgaccgccgcagcaagcgtcttaccgcaagaacggctcggcgaaggcattggataccacggcctcggacaggctatcgccatgagcgtcggcccagccttcgcactttacctagtaggaaccgatccctcaacgaacctctatgtcggccttgccctggttgggtttgcagggcttgtaatcgccctcaacgcacgctatgaaagtaaatggcaaactctgccaagctccagcgcataccgaatcaaaatggaaacccggctcgaactcgactcaaaagacgggcaggcacccagccccaccacagtaactacatccgaaacaattaacagtgaaaagtatcctgaaggcgaccaggtgtccaagagaaccctgcgtgactcattcaacatcttcgagccgcgcgcattgcctggcgccatcccacagatgatcatgtgccccacttttggctttggcgtcttctttgctggtctgtacggtactactctcggctatacccacgccggtctcttctacaccatcagcgcggtaagcatgattatcattcgcatgatttcaaagcatttcatggacaccgtacctgcaatcaaaacaatgaccggagccgtcgcgtgcggcatcctctgctgccttatgctacttgccgcaccgtacggggaacctgtcttcctggcgtccggaatcttctatggtctcgccactggcataagcctgccacttaatcaaagcgtagcggtaaagaacaccccgccagagcgctggggcgccgcaaacgccctgttcctgctcgccaatgacatcggcattggcttcgcaagcgtaatctggggcgttatcaatgactcattcgggttccagacaagcatcgtctgcgtcattgtctgccttatcgcaagctacgcatccgcctggatcgtctaccccgcccgcgacaagcggtggaggcattagagcgtaagcgtcaaaatgaccgcgtagcaggaaacgtccaggaccattccggcatacggatggaaaagtcctggacgtttccatctttgcgttgcggtatgccttaggccgctatgtcgctacaggccctcctcggcgttgttcgccatctcgtcgtcgaacgcatcggggtcgatgttaattatgaagtcgtcaggcatctctttggccttctcggcagcggctgggtcgagcttgcaggactcagacaccctatccgaccacggcaggaacgagtccacaacctcatcggtgagctcgccggcgttgggcatctcggtcagcagccactcgacgtaaagcctgggattgagcccgttggccttggccgtggtggtgacgctgtatatcgccgcagacgcccgcgcgccgcgcggtgcatcgctgaagagccagttcttgcgccctatgacgaagattcgctgggcctgctcggcgacgttgttcgagagctccaggtgccccgtcttcgcgcacgttcatgacgtagggccagaactccacggcgtactgcagcgcacggtgcggcgccagcttcggcgaggctaggggaagctgggcccgcgccccatcccccgaagtcctccatgagcgggcggagctccgcgtcgcgggcggccttcctggcgcccggctccatgtcgtcgaacttggagtcgaccttgaacatggcgtcgatcctgcgccttgcctcgagcgcaacactggccgcagacgccgccttggcgtcgccgccggcgatcttcacgatttgggcgaagtagcggcgcacgtggacgaggcacgccgtgttggcgatgttggggttgccgagattgaagtagggtttgtagccgttggcggtaagcgtgccggaccagcccgcaagaaactcctgggcaacgcccttcctgcgggtctcgtggtattcgaatacatacacgggcacgttgcagcgcgccgagcagaacagccacatcctcgatttcttcttcgcctcgcggttcggctctttcaggacctgaaccgtggtctcatcggcatgaatcctgacatgcgacagcagctcgaccttcattctctcatggaccttcgccagccagcgcgcgtgcacgttcatcatccagttcgccatgtcctggcgcgatatcgtcgcgccgcacgccttgaggtctgtctctatgcggtagagcggcagcgacatgacgtacttgccgttgacgatccaggcaagcagcgacggcgtcgcaaacgagcctggtatcggcggctcaggctgcggtgctcgcacgatgacgcccttgcgctcctattgagtttcacttgagtttcaggggcgtttttggggtggtgggacaaactactgggacagttcactctccgaaaaatcctttactcttcgtccgctgcgtgtcgccatgtccgtggtgtacgcgcttttagagtaaaaatgactgaaaccgcaggtcaaaaggcataaagagaccccctgaaaacgttgtttccagagggtctcaatagtttttactcacccaaaatcacaggtggctttacgctttttcgtacgtggcggcacactgcgacactctacggacggaatttcgattgtgcaaaatccgctccagtttactcccactcgccaaagtaaaactggttctaaacaatactgtttaggggatttgactcttagttgctcaatttgataccaattatccaacctatacggcattgtcggactcctgttatcaaaagattatcaagcccaatgttatcagcagaaaagcaatggtttggatcatctgtattatgccacaagcagagtgctattccaatcaaataagggactgcttcaactgtagaatccgtttttcaatctctcgaatgatctcgacaaagacttgatcttcgcttccggtcggatcttctaatccccagttatcgtcaaatgctctaccaatgaaaggacagcccacattgcaccccatggagattgcaatatcaggggcaggaatatccgagatcagtttggaatactgggttttctccatgtcaatcccgtacagttctttcataatgcggacagcatcctgattgatttgcggttttgtttccgttcctgcggaatagctttcaaacacatcggaagccaagtgctttcccaaggcctcggcaatctgactgcggcaggaattatggacgcagataaatgccacctttttcttactcatatttgaaccagtctttcgttttatttgcgtttttttacaaggaacagcatcacgggaacttctgtcagcacacccacagtcgttgccagtgccgcaggggaagtcgttccaaacaaggcgattgcaacagcaacagccagttcaaagaagttggaagcacaaatcattccggcgggagcagcaatcttgtagggcagcttcaaaacccggcaagcgatatacgcaatcgcaaaaatcaggaaggtctgtaaaatcagcggtaccgcaatcaaaacaatgtgcagaggtttttccagaatggtattgccttggaacgagaaaatcatcaccagcgtcagcaataagccaatggtagttacactgtcaaacatatggatgaaagtctcctcaaagtacactgccccttccgcttgatgacagccgaacgggtcagcataccgccagccagaggaaacaccacaaacagtaccacagagagaatcagggtatcccacggaacgggaacattggaacgcccagcaaaaaatgcccgttgagttcgatttgagtttcacgggccccgaaacggccccgtttcgccctcggggacaaaaaccgcgcgtcaactcacttgggataaatccttactcccattccctcgaatacctccccgtgccttgttgtcttgaaacacggggagtaaatggcgaaatcgcaggtgaaagggagtaaaacggcaaagaaaaagcctccgttccaacgagggaacggaggctaggaaatcgtttttactcactgccgtcgctggcggttttgccatgactctcgtacgaaacgaaactcagcggtacaccacggcactcaaaagagcaggtcaaagccctatcggcttactcccattcgatggtcgccggcggcttggaggtgcaatcgaggacgacgcggttgatctggcggcattcgttggtgatgcgcgtggagatcgtggcgagcacatcgtaggggacacgggaccagtcggcggtcatggcgtcttccgagctgaccgggcgcaggacgatcggcgagccgtaggtgcgctcgtcgccttggacgccgacagagtgaacgtcagccagaagcacgaccgggcactgccagatgtcgcggtcgagaccggccttggagagttcctcgcgggcgatggcgtcggcctcgcgcagcaggtcgaggcgctccttggtgatctcgccgatgatgcggatgcccagacccgggcccgggaagggctgacgccagacgatttcgtcgggcagaccgagctcggtgccgatggcgcgcacctcatccttgaacagagtgcgcagcggttcgatgagctggaacttgatgtcctcgggcaggccgccgacgttgtggtggctcttgatgttggccgcgccgtcgccgccgccggattcgacgacgtcggggtagagcgtgccctgcacgaggaacttgacctccttgccgcgggcgccggcctcttcgaggacctggcgctgggccttctcgaaggtgcggatgaacttctcgccgatgatcttgcgcttgcgctccggctcggagacgcctgcgagggcgtcgaggaagtcgtcggcggcgtcgacggtgatgaggcggatgccggtcgcggcgacgaagtcgtgcttgacctgctcgacttcgcccttgcgcagcaggccgtggtccacgaacacgcaggtgagctggtcgccgatggccttgtgtaccagagcggcggccacggcggaatcaacgccgccggacaggccgcagatcacctcggcgtcgccgacctgctcgcggatcttcttgacttgatcctcgataatcgaggaggcatcccagtcgttgggcagcgcggcgcaacggtgcaggaagttttcgataagcttctggccaagcggggagtgcttgacttccgggtgccactgcacaccatagagcttgcgggattcgtccgccatggcggccacgggcgcgccttcggtgtgggccagcacttcgaagccggccggggcctgttcgaccgccacaccgtggctcatccacgtggtctgctcggcgggggagtcggcgaggatgccggcggcgtcgtcgatggtggctgaggtcttgccgtattcgccgagcgcggccttatccaccttgccgccgagctcataggccatgacctggaagccgtagcagataccaagcaccggaacaccggattcgaataccttggtgtctatggtcggcgcgccgggctcgaacacggaggccgggccgccagacagaataatcgccttcggatccttggccaggatctcgtcgaccggcatggaatgagggaccagctcggagtacacgcctgcttcgcgcacgcggcgggcgatgagctgggcgtactgggcgccgaagtcgacgacaagcacaggaccgtttgccattgatattcccctaacgttcattggaattttacgtgggctgaacacccctgattatcactggtcaaggcgacaaggccgacacgcagagactatgtgcgcaaatcgaacaaactacatgcctgtagacggacaacacgccgatttcgaacatgggaaatcgaacgtgcgctgttctagccaaatgctggatttccgcatgcttccgccgttttgaaaaagtatgttgaaaaaactaatgttgacaaacggtcagtcgaaccgcacaaatactgaaatatccgcaacaatttcgaacacacccgcaagaaatcgttcaaaagtcgcgttgtcctcgtaccatgacgattgattgggaacggaaaaccttggcaccgcaagggtcagggaccgtgaccgaacagaaataatcaatcgcacgatcacgtgcaggagtacaggagtacacatgacgagtcctgttattggcaccccttggaagaagctcaacgctccggtttccgaggaagccctcgaaggcgttgacaagtactggcgcgttgccaactacctttccatcggccagatttatctgcgttccaacccgctgatgaaggagcccttcacccgcgaagatgtgaagcaccgtctggtgggccactggggcactacccctggcctgaacttcctcatcggccacatcaaccgtttcattgctgaccacggccagaacaccgtgatcattatgggcccgggccacggtggcccggccggtacctcccagtcctacctggacggcacctacaccgagaccttcccgaagatcaccaaggacgaagctggtctgcagaagttcttccgtcagttctcttacccgggcggcattccgtcccacttcgctccggagaccccgggctccatccacgagggtggtgagctgggttacgctctgtcccacgcttacggcgccatcatggacaacccgagcctgtttgtcccggccatcgtcggcgacggcgaggctgagaccggcccgctggctaccggctggcagtccaacaagctcgtgaacccgcgcaccgacggtatcgtgctgccgatcctgcacctcaacggctacaagatcgccaacccgaccatcctgtcccgcatctccgacgaagagctccacgagttcttccacggcatgggttacgagccctacgagttcgtcgctggcttcgatgatgaggaccacatgtccatccaccgtcgcttcgccgagctgtgggagaccatctgggacgagatctgcgacatcaaggccaccgctcagaccgacaacgtgcaccgtccgttctacccgatgctgatcttccgcaccccgaagggctggacctgcccgaagtacatcgacggcaagaagaccgagggctcctggcgttcccaccaggtgccgctggcttccgcccgcgacaccgaggcccacttcgaggttctcaagaactggctcgagtcctacaagccggaagagctgttcgacgccaacggtgctgtcaaggacgacgtccttgccttcatgccgaagggcgagctgcgtatcggtgccaacccgaacgccaacggtggtgtgatccgcaacgacctgaagctgccgaacctcgaggactacgaggtcaaggaagtggctgagtacggccacggctggggccagctcgaggccacccgtaccctgggtgcctacactcgcgacatcatcaagaacaacccgcgcgacttccgcatcttcggaccggatgagaccgcttccaaccgtctgcaggcttcctacgaagtcaccaacaagcagtgggatgccggctacatctccgacgaggtcgacgagcacatgcacgtctccggccaggtcgttgagcagctgtccgagcaccagatggaaggcttcctcgaggcctacctgctgaccggtcgtcacggcatctggagctcctacgagtccttcgtccacgtgatcgactccatgctgaaccagcacgccaagtggcttgaggctaccgtccgcgagattccgtggcgcaagccgatcgcctccatgaacctgctggtctcctcccacgtttggcgtcaggaccacaacggcttctcccaccaggatccgggtgtcacctccgtcctgctgaacaagtgcttccacaacgaccacgtcatcggcatctacttcgccaccgatgcgaacatgctgctggccatcgccgagaagtgctacaagtccaccaacaagatcaacgccatcatcgctggtaagcagcctgctgccacctggctgaccctggacgaggctcgtgccgagctcgagaagggtgccgccgcttgggattgggcttccaccgccaagaacaacgatgaggccgaggtcgtgcttgccgccgccggcgatgtcccgactcaggagatcatggctgcttccgacaagctgaaggaactgggcgtcaagttcaaggttgtgaacgttgccgacctgctctccctgcagtccgccaaggagaacgacgaggctctgaccgacgaggagttcgccgacatcttcaccgccgacaagccggtgctgttcgcgtaccactcctacgctcacgacgtgcgtggcctgatctacgaccgtccgaaccacgacaacttcaacgtccacggctacgaggaggagggctccaccaccaccccgtacgacatggttcgtgtcaaccgcatcgaccgctacgagctgaccgctgaggctctgcgcatgatcgacgccgacaagtacgccgacaagatcgacgagctcgagaagttccgtgatgaggccttccagttcgccgtcgacaacggctacgatcacccggactacaccgactgggtgtactccggcgtgaacaccgacaagaagggtgccgtcaccgctaccgccgctaccgctggcgacaacgagtgataacacctccacggtgttgttagttcgctaacaccaaagggctcgggattcgtcccgagccctttgcttattcataagccctgtcacggtggggcagaacaaagcgaactgttgtgatgttttaatcgcgtagcaccccgaaatgcagtagggcgttgagtacgccgtcgtggtccacgtcatcggtgatgtaatcggcggcggcctttggctcggcggtcgcgttgcccatcgcgactccgatgccggcgtaggcaagcatatccgtgtcattgccgccatcgccgaaggccatggtctgctcgcgcgtgatgccgtaatgcgccatgaaccgctggatgccgcgcggcttgccgccatcggccggaatcagatccgtgaaatccggatgccaacgcaccccgcgcacattgctgcacagtcccaccagttcggcctccaactcgggcccgacaaaggggctgagctggaaagtctcatgatccagcgcgcgggtgcgcgggtcgtcaaaataccgggtcggtgcggttttgcccagtttgctccacgtggcgcgaagcagatcattggactggttgaagtacacgtaatccttctcgccgaaattgcacaccacatcggggtgacggtccagccagtcgagaatcacctcaatatcagcagtatccaaggcctgcgaggcaaagaagccggtgtcatcaaagcaatactgcccattgaacgccaccatgccatcgaacgtcaccggcatggtatccagcaccacgtgcatctgtgaaggcgcgcggcccgtgcaaatcagcaccttgacgcctgcggcctgcagccggtgaatcgcctcgattgtggaatccggcaccgtatgggtcgtgaaactggtgagcgtgccatcgatatcgaagaatacggctcggatatcggcattggcagtatcggtagtcatagcttccattgtcaaagcccctctcgacgtgctttccggcgtgttcggcacgcctatagcgggttatcaaacgcacgaatcccggacattgcatgcgcgccataaaagacacctatacggcaatcggccattttccgtcactttcgcgtttcaagcgcgttatggtgttacctgacatcaattttggagagaggaaatccaatgacagcagcaacccagccggcaaccccggtcgctcctaacaataacgagccggtgcgtgtgaaccacaccgcccgcaacgtcatcatcaccatcgtggtcgtggcgattatcgctgtggccgcgttcttcggctaccgcgcgtttgccggtgccaacgagtcgtccgccaagggcagcaagggcaacccggtcaagatcggcgtggtcggcgctaccaaccccgaatgggtcaagttcaagcaggacgccgagaaggccggcatctacgtcgacatcgtcgacttccaggactacacctccgaaaacccggcccttgactccggcgagctggacctcaacgaattccagcacctgctctacttggccaactacaacgtgagcaacaagaaggacctgcagcccatcggcggcaccgccatctacccgctcggcgtgtactccaccaaggtcaaggacatcaaggacctgaagcagggcgacaccgtcaccattccgaacgacgaaaccaaccaggcccgcgctatcggcgtgctcaaggccgccggtctcgtgacgctcaaggacgactggaccgccttctccaccccggccgacatcgacgaagccaagagcaaggtcaaggtcaccccgctcaaggccgaacaggtggccaccaccctgaaggacccgaccatcgccgctggtgtgatcaacaacgactacgtggccgacgccggtctcgacccgaaggacgccatctaccaggatgacgccgaatccgaagaagctcgcccctacatcaacgtgtgggtggcccgcaaggcggacgtgaacaacgagacctacaagaagctcgtttccatctaccagcagaaggatgtgctcgacgccctgcaggagaactccggcggtaccgcggtgttcgccgacaagttcagcgccagcgagctgcaaggcttcctgtccgacattgagaaggatgccaaggcccagcagtgagccgcggctgatacgagcgcacgactaacctatccatagccattaccaccaagcggagcgagtacccgagccaacaatcgggattcgctccgcttccgtgaccggacaccaacaaccagcatcagggagcactatgagcgaccccatcatcaccttcgaccatgtcgtgaaggaattcaaaacacgcggacgcggcgcgaacatcgcacgagccgtggatgacgtcagcctgaccatcgatcgcggcgacatcttcggcatcatcggctattccggtgcaggcaaatccacactggtccggcttatcaacgcgctcgaacgacccacctccggcactgtgaccgtgcttggcactgatatcacctctctgagtgagaccaagctgcggcccatccgccagaaaatcggcatgattttccagcagttcaacctgttctccaccaaaaccgtggcccagaacatcgcctacccactgcaactcgatcactggcgcaaggactatcaggatcgtcgtgtcaacgaactccttgaattcgtgggcctcagtgagcacgcaaacaaatacccttcgcagctgtccggcggccagaagcagcgcgtcggcatcgcccgcgcactggccactaatccggagattctgctcgccgacgaagccaccagcgcgctcgacccggaaaccaccaccgaagtgctggccttgctcaagcgtgtgaacgaggaattcggcatcaccattgtgcttatcacccatcagatgaacgtggtccagcagattgccggccgcgtggccgtaatgagcgccggacgcgtggtcgaatccggcgacgtgtacgacgtgttcgctgcaccccagcagccggtgaccaagcgattcatcgccaccgcattgtctggcctgcccgaggaagaccgggtcgagcgattgcatcacgaatggtcgggccgcattgtcaccgtgcttatccgccaaaaggacgtttccggcacccaaggccatgaactcaaggcatccggacagaatatctccaaactcatcgccaaatacggcgtcgaatccagcctgctctacggcggcatcgacacggtcaaggggaccgccatcggtgccatcacctacgaattcaacgggcccggctggcatgtggacgaattcctgcgcgagctcgccgccaatagcgacgtcatcgacttcggcaccgccgcaaaacccgtggcctacgccgacgcagtcgccggacatgcctcctacgccgaagaccgcgcccatgacccactggcggccgatactgccaccgcgtccgccgcgtccgccgccgcacatgaaggagccaacgcatgatcatcctcgccaacccgcgtagcgactggaacgtgctgcgtccactactgttcgaatccattggccagaccctgaccatggtgctcgtcaccctcgtcatcggcggattcctcggcctgatcctcggcgtggtgctctatggcacccgccccggcaacctgttcgagaacgcggtcgtctaccgcatccttgacatcatcgtcaacatcgtgcgcccgattccgttcatcatcttcctggcagccatgcagccgctcaccatcgtcgtggtcggcacgtccatcggcaccgtggccgccatcttcccgatggtggtgatgtgcaccttcgccacctcgcgtctggtcgaacagaatctcgtgccggtcgacccgggagtaatcgaggccgcgcgttcgatgggtgccggcaagctcaccatcatccgcaccgtgctcatccccgaagccctggcaccgctgatcctggcctacgccttcctgttcattggcgtgctcgacatgtctgccatggccggctacatcggcggtggcggtctcggtaacttcgccatcgcctacggctaccagaagttcgaccagaccgtcacctggacggccgtgatcatcatgatcgtactggtccaggtggtgcagggcatcgccaacgccatcgccaaacgactgctcaaacgccagcaataacaaggcatactgaccccatagatcgcggccctcgccaatatggagcgagggccgcaatatattcttcgcgctactagaatcgggaaccatgagtgaacatatcgacatcgaccacgaactcatcactatccgccactacctgcacgcccatccggagcgtagtttccgtgaattcggcaccagcatctatctgaccgaccagctcaaggcgcacggcatcgagatcctgcacaacccgctggagactggtgttgtggggctcattcagggcgaggccggtcccgggccgcgtatcgggctgcgcgctgacatcgacggcctgcccatcgtggaagactccggactggagttcagctccgtcaatgaaggcgtgatgcacggctgcggccacgacctgcacatgaccggtctgctcggtgccgccttctggctcgccgagcaccgtgacaagttcgccggctcgatcaagattctgttccagccgagtgaggagaccggccaaggcgctcgcgccatgatcgacgccggactcgtggatgacgtcgaagccattatcggcacgcacaacaaccccaactatgcgcccggccagctggccatcggcgttgagccgatgatggccggctgcgtgaaattccgcgtgaccctccacgcccaaggcacccacgccggttacccgtacaagggcaccgggcccatcgaagcgctcgccagtattattctgagcctgcagaccatcgtgagccgcaacgtcacgcccttccatccgctggtgctgtccgttaccgaagtgcacggcggccatgtgtggaacgtggtgcccgccgaagccggattccaagggactgtgcgctatttccacaagtcggatggcaatctggtcggccgccgattcaaggaagtggtggaacacaccgccgaggcatacggcatcagcgccgacgtggtctgggatgactttcaagacccgctggtctccgatccaggtctcgccaaggccgtggcggcggatgtcaacgactacgcgcagctcgaaccgatacgtcagtcgatggcgggggaggacttctgcgaattcgccaaggtgacgttgccggtgttcgcgttcgtcgggtcaaacggccaggaaggttgcgccgactggcatagcccgcatttcgtgggtctcgacgaatccattcccaccttcgtcaacttctacgtcaacaccgctctgcgcgtgctcaacgagctgaagtaaatccttttctggctcgcctccggaggctgaggcgttaggcagacagcccagtgggctgtctgtagccgaaggtgaggcgacagccgaaccagatatgcgcgggcctcgcccgtccataagtgcaggacgagctatcagcgaagctgactgaggggagtggcattcgttcattaggtcgattcatcgtccattaggtcggtgaacggcgatactggttgttggaatcgcgccattgcaacgactgatatcgcattgcagtgacctaatgaacgcaaaaacgacctaatgaatgacgccaagccggaagaacaggcaatccgacgtcatacgcggctacactaagaatctatgacacagcttcgcttcgcactcgcccagatcgacacctgcgtcggcgcgcttgacgccaacgccgccaaggtgctcgactactcccgtaaagccgccgcaggaaacgcccaagtggttgttttcccggaaatgaccctcaccggataccccatcgaggatctggccctgcgccgcaccttccgccaagccgcatgggacaaggccaacgaactcgccacccagctcaacgacgacggcctcggcgatctgttcgtggtggtcggcaccgtgggcaccgaccgcaagacctccaagccgcgcaaccgactggtggtcttgcaccaaggcgtggtctgggctggctacgacaagcacttcctgcccaactacggcgtgttcgacgaattccgcatcttctccgccggcgaccgctccgtgaccctcgacgtggacggcgccaccattggcgtggccatctgcgaggacatctggcaggacggcggcccggtggccgacctggccaccaagaacatcgacctgctgctcaccatcaacggctcgccgtatgaggaaggcaagaccaacacccgtttcgagctcgcccagcgtcgtgccgccgaggttaacgccccggtcatctacctgaatcaggtcggcggtcaagacgacctcgtcttcgacggcggcagcttcgtggtcgacgccgacggcacgcttatcgaacgcagcccgatgttcatggaaaacctgacgttctgggacttcgattccgccgccgaacatcaggccaaggccgagatcgttccggaactcgacccggacgaagaggtatacaccgcctgcgtgctcggcctcaaggactacatggccaagaaccacttcaccggcgtgacgctgggcctctcaggaggcatcgactccgcactggtagccgccatggcggccgacgcatgcggcggcgagaacgtctggggcatctccatgccctccatgtactcctccgacggttccaaagacgacgccgccgatttggcctccaacattggcgcccattacgaggtccagcccattgagccattgttcaacgcctaccaacagcaacttgaccttgatggcgtctccgccgagaacctgcaggcccgcatccgcggtgtgatcgtgatggccagctccaattcgcgcggtctgctcgccgtggccaccggcaacaagtcagagctcgcctgcggctactcgaccatctacggcgatgcggtaggcggctacgcacccatcaaggacctgctcaagacccgtgtctgggagatcagccgttggcgtaacaaggccgcggccgcaggcgtcggcatcggcggtctcaagatcgtgggcaacgaggacggcaacaccggcatcccgttgaaggacggcgtgatgattccggtctcctccatcgagaaggcaccctcggccgagttgcgccccgggcagaaggactccgactccctgcccgaatacgcgctgctcgacaaggtgctcgccgcatacatcgagcacgcgcacggccgcgccgacctgttagccgacggcttcgaccaggtcaccgtagacaccgtgatgcgattggtggactgcgccgaatggaagcgccgccaatacccgctgggtcccaaggtcacggccctcgcgttcggccgcgaccgccgcctgcccgtcaccaacgcattcagggaataaacatatattgctcccgccagcgggagcaagtaataccgttgaggaggtaccaatgacagacgataacaagaagcagtggtatttcaacaccgtcaagaagcaggccgagctgggcatgatctcaccgatcgaacagcgcatgggtccgtacaagaccaaggaagacgccgaacatgcgtgggacatcgtggtggaccgcaatgccagatgggaggaggagaaccggcgctggaagaactacggcgtgaaacccgcacaggctcaccccgaggattgacggtcgaaaactgactgatacggttctgctgtcaatctcaagaccgaaccgctcatcaaaccgctcatacgaacatcacagtatgagcggtttcccatatctggagacgtgcaatagtcccatcaatacctagaagccattggaatggtagcgttcacaaaaacaatgtgagatagctcactcccaatttcagcttttctcaagcaagtgccaactacactgttgaaccaagggttccgtgaagatgcgaaacctacaaccccatttaaggagtgacatgaccgcagtggaaaatgcagctgtctcccaggaggagctcgacgccaaggcgtgggccggcttcaccgagggcaactggcagaaggatattgacgtccgcgacttcatccagaagaactacaccccgtacgagggcgacgagacattcctggctcctgccaccgagaagaccaagcacctgtggaagtacctcgacgacaactacctggccgtggagcgcaagcagcgagtctacgacgtggacacccataccccggccgacgtcgacgccttcccggccggctacatcgactccccggaagtcgataacgtggtcgttggcctccagaccgacgttccctgcaagcgcgcgatgatgccgaacggtggctggcgcatggtcgagcaggccatcaaggaagccggcaaggaaccggatccggagatcaagaagatcttcaccaagtaccgcaagacccacaacgacggcgtcttcggcgtgtacaccaagcagatcaaggtcgcccgccacaacaagatcctcaccggtctgccggacgcctacggccgtggccgcatcatcggcgactaccgccgcgtcgccctgtacggcgtgaacaagctcatcgccttcaagaagcgcgacaaggactccgtgccgtaccgcaacgacttcaccgagccggagatcgagcactggatccgcttccgtgaggagcacgacgagcagatcaaggccctgaagaagctcatcaacctcggcaacgagtacggcctcgacctgtcccgcccggcccagaccgcgcaggaagccgtgcagtggacctacatgggctacctggcctccatcaagtcccaggacggcgccgccatgtccttcggccgcaactccgccttcctcgactgctacatcgagcgcgacctccaggccggcaagatcaccgagaccgacgcccaggagctcatcgacaacatcgtcatgaagctgcgtatcgtgcgcttcctgcgtaccaaggactacgattcgatcttctccggcgacccgtactgggcgacctggtccgacgccggcttcggcgatgacggccgttcgatggtcaccaagacctcgttccgtctgctcaacaccctgaccctcgagcacctcggacctggccccgagccgaacatcaccatcttctgggatccgaagctgcctgaggcctacaagcgcttctgcgccaagatctccatcgacacctcggccatccagtacgagtccgacaaggagattcgtagccactggggcgacgacgcggctatcgcatgctgcgtgtccccgatgcgtgtcggcaagcagatgcagttcttcgccgcccgcgtgaactccgccaaggccctgctgtacgccatcaacggcggccgcgacgagatgaccggcatgcaggtcatcgacaagggcgtgatcgagccgattaccccggaggccgacggcaccctcgattacgagaaggtcaagaacaactacgagaaggccctcgaatggctgtccgagacctacgtcatggccctgaacatcatccactacatgcacgataagtacgcgtacgagtccatcgagatggccctgcacgacaaggaagtgtaccgcaccctcggctgcggcatgtccggtctgtccatcgccgccgactccctcgccgccgtcaagtacgccaaggtctacccgatctacaacaaggacgcgaagaccctggaaggccacgagtacgagtacgttgagggcgccgacgacgacctgatcgtcggctaccgcaccgagggcgagttcccggtctacggcaacgacgacgaccgcgccgacgacatcgccaagtgggtcgtctccacggtcatgggccaggtcaagaggctcccggtctaccgcggcgccgtcccgacccagtccatcctgacgatcacctccaacgtcgagtacggcaagaacaccggttccttcccgtccggccacgccaagggcaccccgtacgctccgggcgccaacccggagaacggcatggactcccacggcatgctgccgtccatgttctccgtcggcaagatcgactacaacgacgctcttgacggcatctcgctgaccaacaccatcacccctgatggcctgggccgcgacgaggacgagcgcatcggcaacctggtcggcatcctggacgccggcaacggccacggcctctaccacgcgaacatcaacgttctgcgcaaggagaccatggaggacgccgtcgagcaccccgaaaagtacccgcacctgaccgtgcgtgtctccggctacgcggtgaacttcgtcaagctcaccaaggagcagcagctcgacgtcatctcccgtaccttccaccagggtgccgtcgtcgactgatgaccaaccccgcgaaccgcggcaatgactaactgaaggggtggggcacggctccaccccttccttatttcccacagactttcgcatcatttggaacaggaggacaacgatgcccgcaacacccacgttccgcaccacgaccaggcatatgctcaaggaatcgaagacctatgcctcgcagactttgatgggtggcctttccggctttgaatccccaatcggactcgaccgacgtgaccgcctttccgccctgaaatccggcgatatcggcttcgtccactcttgggacatcaacacctccgtggatggaccgggcacccgcatgaccgtgttcatgtccggctgcccgttgcgctgccagtactgccagaacccggacacttggaagatgcgcgacggcaagcccgtctaccttgacgccatgatcaagaaggtcgatcgttacaaggacctgttcaaggccacgcatggcggtatcaccttctccggcggcgaatccatgatgcagcccgccttcgtctcgcgtgtgttccatgccgccaaggagatgggcgtgcacacctgcctcgacacgtccggcttcctcaacacgagctacaccgacgagatgctcgaggacatcgacctgtgtctgctcgacgtcaaatccggcgacgaggagacctatcacaaggtcaccggcggcaccttgcagcccaccatcgattttggccagcgactggccaaggccggcaagaagatctgggtgcgatttgtgctcgtgccgggcctgaccgactccgaagagaacgtcgaaaacgtggcgaagatctgcgagtccttcggcgatgccgtcgaacacatcgacgtgctgggattccaccagcttggccgcccgaagtggcacgaactgcgcatcccatacccgctggagaaccagaagggacccaacgccgccacccgcgaacgggtggccaaccagttcaaggaccacggcttcaccgtgtattaaattgcagggccgaaccgcgcgtaaataccacgattcggcccgttcgcccataccctagagatatggccgacatctacgcatttcctacgggagagtccaacgacggacgccccgtgcgccctcagggtgtgccggatgaagtatgggcagccgtcgaatccgtcagcaccatgaagcgcatccatgacgtgcgctatcgggagattcccgtgccttccaccttggccgattatggtatcggcgtggaattcgaagcgggagagcgtgccctcggcgatgccttttccgccggtcttggcagcgatgccgaatcacgaatcgccacaggctggatcatgatgctttatgctcatgagctgcgcattgactgggattctaactggcgttgcgtggcgttcgcgcgactgccgctggaaaccgccgaaaacgattctctgacccccggcatgtactgggatgacatgtgcgactatttcgacggcatcgagccggattcggtatccggcacagtcaccgtgacccaaaacacggcttttggctcgatggccggctccaccagcgccgggtgtgagattcgcgtctcatggaccccgcttgacgggaccgggccggacggtactatggacgccggcgcacaagtccgctcgtgggccgcattcatcagatccaccatccgttttgaggaggatgacgccagttgagtgacgtccgtgacaccgaaccccgactgctgaaagagcctcgcgggggagtacccgatgtcacttcgacgctggacggctatcatcgtgtctgcgatgcgctggccgaggcgacgggctcgctggccgccgacgccgaacgggcgtccggcttccgctatggacacgaggattggctgattcagttcaaacgtgagggtgcaggcatcgccttgcttgatcccgtcgccctgacccgggccggagctgattggaatgaattcaatgacgccgtgggcgacgccacgtggattctgcatgattctctgatggacttgcccggattcgccgaaatcgggctcaaacccaaagccctgttcgacacggaaatagcggcacgattgctcggcctgcaccgctttggtctggccgccgtcaccgaacactacctcggcatcacgctagccaaagagcattccgccgccgattggtcctaccgtccgctgccgcgcgactggcgcaactatgcggcgctcgacgtggaggtgcttatcgaacttgaaaccatgatgcgtcgtgacctgaaagccgcaggcaaggacgagtgggccgctgaagagttttctcacgctttggttgcgggccttgccccgcgcaaaccgcatccgattccttggctgcgtatctcgcgcatcacccagctgagtcgtgatccaaggggcttggccatcgccaaatccctatgggaggagcgcgaccgactcgcccggcaatacgatattgcgcccagcctgttattggccgattcctcaatcatcgaggcggcgaccaacaagccgcacaatgctgcccaattccgcgcgctccgatccctgaacgagcgtgtgcgcatccataccggcaccgagcaggacaaaatgttcgagcggtacgcgccgattcagcgtgcggtcaaaccgaaggtctggaagcaggccatcgatcgagccatggccctgaagcccgcccaatggcctaccatgcccgcccccgaacaggacgaaaacggtgtggtgaacgcgccccgatccatgcggctgtggcaacagcgccatccggagcgttatgaccgtctgcaacgggtgcggcgtgtgatcaaccgcatcgccgaagacacccgcacgccggccgagatgatcatcaagccacagatcctacgcaacctgtgctgggtggaagacccggtggaagtggacgtcgagacgttcctgatcgagcagggcgcaaggaactggcaagtgaaactcattgcaccgtccgtaagtggcgttatcatgtagaggttgccttacggcagaactgtaagaaataacgacttttgaggagtcattagcgtgaagatcagcgttcgtaacctcgagcccaccaaggtgaagctcaccgtcactgttgaaccggaagagctcaacccgtatctggatgcggcccgtaaggaaatcgccaagcaggtgaacgttcccggcttccgtaagggccacgttcccggcaagatcatcgaccagcgcatcggtttcgccgccgtcgccggtgaggccgtgaacgacgcggtcccggagctgtactccaaggccctggatgagaagaagattcgtccgatggctcagccggagttcgacgtgcaggatgttccgcagtccgccaacgacgagaccaagctgaagttcaccgccaccgtcgagcgtcgtcctgacatcgaactgccggaaatcgacggtcttgagatcgccatctccaagccggaagtcaaggatgaggacgtcgacaagcgcctcgaggccctgcgtcagcgcttcggcaccttggtcggcgtggaccgcccggccgccaagggcgacttcgccaacatcgacctgactgctgagattgacggcgagaccgtcgactcccaggaaggcgtgagctacgagctcggctccaacaccatgctcgacggtctggacgaggcccttgacggcctgtccgccggcgaggagaccaccttcgaaggcacgctggaagccggcgagcacgagggccagaaggccaccgtgaaggtcaaggtcaactccgtcaaggctgaggaactgccggagctgaacgatgagttcgcttccgaagcttccgagttcgacactctggacgagctcaaggctgacatccgcaaggctgccgctcaggacgccgaaggtcgtcaggccaccgaggctcgcgatgccttcatcgccaagctgcaggaaggcctcgagatcccggtgccgaagggcgtcaaggccaacatggtcgaagagcagctcaagggcatgaccccggacccggagaaggccaccaaggagcagaaggctcaggccgaggagaccgtggagaaggatctgcgcgatcagatggtgctcgacgctctggccgagaagctggacgttcaggtgtcccagtccgacgtgttcaacttcctcgcttccatcgcccagcagtacggcatggatccgaacaacttcatccaggccatcatcaagaatggccagcttggctccgctgtgcaggaagtcggccgttccaagggcctgctcgccggcatgcgcgccgtcaagttcaccgctgatggcgaggttgtggacctctccgccttcctgggcgaggccgctgaggacgaagagtccgagtccgtcgaggccgcttccgctgctgccgccgtggccgacgaactgtccgccaaggatgacgccaaggatgctgagtgagcatagcctcatcgcgttagcgtgattgtttgagcccggaatcgtgtttcatggttccgggctcttcctattctggcaaaaggactatttctttggctcccctctttgagggggagctgtcgagcgtggcgagactgaggggagttcccaaggcatactcgttgcatagggtgcggaggttgacatgcagccaacggttactatcaaacgccttggttggctcgctgcggcgaccattgtgctcggcgtgctcatcggtgtgggagcaggtctgctgaccctgttgctctacggcgttgaacatgtgctgctcggctacatcgaaggcccagaattgtctggtccattcggcgtgcccgctgcacgccgtgcgatatcggtgaccgtgggactcagcatcgcaggcattatctggtatctgctgcgacacaaaacgactgcggtgccctcagtcaagaaggccgtggcaggaaagcgaatgcctttctggcaaaccattgcgcatgtggtattgcagattttcatcgtcggctccggtgcctcgatcggccgagaagtcgccccacgcgaactcggcgccatgctcgcgcaacgtttctgcgacctgttccatatcgagggcgttgacggcatcgaccggcgcatggtggtggcagtggctgccggtgctggtctaggaggcgtctatgacgcgccactggccggcatgttcttcgccgtcgaaatcctgttggtagatgtgacaatcgaaaaagttgcgtttggactgggcatgtctgccattgccgcattcgtggcggttgcgatcaaagggcatcacctgttctacgacattaccgccatgcaaccggaatccacgccaacgttaatggtgttcgctctgatctgcggtgcggcatgtggagtgggcggcgcattgttccgaaaaggttcgcaatgggcggaagcgcacaagccaaccggtaaggctattctgtggcagatgccgctggctggtctcatcaccggtttggtggcgactgttgtgccgcaggtgatgggcaacggccgtgccgcagcgcaacttggattcagcacattcattcctgaaaccgccggcactgctggtgccatgcagtcggcatcttcagcggccgcctctccatggaacttgctgacgggcggcggtaatgtatccgattcggcctctggcgggggagcgggctctggaatggcatcgttctgggccatgcttcagggtgggagcggcccttctggatccgtgatgaacgccggtttcccgctgtcccagtccaatatctggatgttgctgggtgtgttggcactcacctttgttgccaaagcgctggtgacgctgatgaccattcgctccggtgcgtcgggcggtgtgctgcagcccggcatcgcattaggttccacgctgggtgcgatgctcggcctcgtatggatactgatgtttccgaccgattcggtaaccgcgtgtgccttgatcggtgcggcttcgatgctttcggcctcacaacaggcaccgcttatggccatgtgcttggtgatggagctctctgaagcgccgattaccttctttgtgccggtcggcatggccgtggccacgtcgtcactgatatcaaagtggttgctgagtcgtaagtaaatacatatattctggctcccctctctgaggggagctgccccggtcgaaactcccctcagccgcctatggcgacagctcccctcagagaggggagccgaggtaaagaaagctatgtcagaaaatacagaaattcgctcggcacttgaattgcttgccgctgagccgctcactgagcagattgactactatcgaaagccattcatggtgttatgggccgccattcaggaggcagccagcgatgtggccgaagactacgacttacctgcggatatggcccaattatgggtggccgaacagatgcgccaagtcgccgattcactggtcgatcggctcgcggaaaaagccgtggcccatggtgccagcaagtccaacgtagcgcgagccgccggtgccagccccgccaatgccgcccgtcgcttcccgcgtctgggcgacgatgccgcctcccagacgcgcctcctcattgacgacgtcctcgataccttggaataaaccgaaatccctacgctacccgccaaaaagcacgcgaaaagacgccttcagtcgcttcaaggcggtagtctgaacaatgttcgagtaattagaaggagaatcaaggtgagcaatacctttgcgaccttgccggtcatggcgggcgatgacgtcccggccggccccgtcgacccgattttcaaccgtctgctcaaagaccgcatcatctggatgggtgaagaggtcaaggacgatatggccaaccgcatctgcgctcagctgctgatgctggccgccgaagacccgaagaaggacatctggctgtacatcaactcgccgggcggctccatcaccgccggcatggccatctacgacaccatgcagctcatcgagcctgacgtggcgaccgtgggcctgggcatgtgtgcttccatgggccagttcctgctgagctccggcaccaagggcaagcgttacctgacctcgcacgcccgtgtgctcatgcaccagccttccggcggcatcggcggcaccgccactgacgtgcgcatcaacgccgagctcatcatggacatgaagaagaccatgagcgagctgaccgctgagcagaccggccacaccctcgaggaaatctaccgcgacaacgaatacgaccactggttcaccgcccaggaagccctcgactatggcttcgtggacaagctcgtgaccacgccggacaccatcggcaacaaccagcagggggagtgagactcatggcaagtgaagaagcaaagttcgccgcccgtgccgaccgcttggccggccgtcagggcgtagccggtttcatgccggcctccgcccgcgcagcccagcccgcgccgaccaaccgttacatcatgccgcagttcgtggagaagaccccgtatggcatgaagacccaggacgcctactctcgcctgttcgaggatcgcatcatcttcctcggcgtgcaggtggacgacgcctccgccgacgacgtgatggcccagctgctggtcctcgaatcccaagatccgaaccgtgacgtgatgatgtacatcaactcacccggcggttcgatgacggccatgaccgccatctacgacaccatgcagtacatcaagcccgacgtgcagaccgtgtgcctcggccaggccgcctccgccgccgccattctgctggcctccggcaccaagggcaagcgcctgatgctgccgaacgcccgtgtgctcattcaccagccggccatcgaccaaggcttcggcaaggccacggagatcgagattcaggccaaggaaatgctgcgtatgcgcgaatggctggaggagaccctcgccaagcacaccggccaggacgtcgagaagattcgccgcgacatcgaagtggacactttcctgaccgctcctgaagccaaggaatacggcatcgtggacgaggtgttggaacaccgccagtaaaacttccggacattgcaataccctcggtcggcaacgaccgagggtattgtatttcaaggatgacaatgataatgcgcagcgtggcggttcgacggtgcggcgcagtcggcaaaggagaatcatgggacgtgtggtgagctacaacgaggacgtaccccgttgcacgttctgcggcaaaaccgaacatcaggtacgaaaactggtggccggtcccaacgcctccatctgcgatgaatgcatcgccctgtgcgtggacatcatctccgaggagcgtgtcaaagatgccgaggtcaattcgctgagcctgcccaagcccgctcagatcttcgattatctcaaccgctacgtcatcggtcaggagaacgccaagcgcgcattgtccgtggccgtatacaatcattacaaacgcgttaatatggagcttcaggagtccgctgagcagcttgacgggaataacgggcacggtggccagaccggcaaacaagccaagcaatccgctcccgcccagacgcgtgctgcccgccgcagcaatgaccctttggctgacgtcgaggtcgccaagtcaaacattctgttgctcggccccaccggcgtgggcaaaacctatcttgcgcaggcgttggcccgcgtaatgaacgtgccgttcgtcatcaccgacgccaccaccctgaccgaggccggctatgtaggcgacgatgtggaaaccgtgctccaacgtcttctccaagctgcggatggcgacgtaagccgagcccagcacggcatcatctacattgacgaaatcgataagatcgcccgcaaatccggtgagaacacctccatcacccgtgacgtgtccggtgagggcgttcagcaggcgttgctgaagatcttggaaggaaccatcgcctccgtgccgttggagggcacgcgcaagcataaggagcaggacgttgcgcagatggacacacgcggcatcctattcatctgcggcggtgcgttcgtggggctgacggacattgttcgcaagcgattaggccgtcgagagaccggcttcggcgcgaattggcatgacgccgacatgaaagacgaggaattgctcgaacaggtcaatgccgatgatctggccgagttcggactgttgcctgagtttatcggacgtttgccggtcaccagtgtgctgaaggaacttaccgtagacgatctgacggcgattctcacccagccagccaacgcgctgatcaagcagtaccgtaaactgttcgccgtcgacggcgtcgacctgcaattcacagaacaggccattcgggcgattgctgatatcgctatcaagcaggggaccggcgcacgcgggttgcgttcgattatcgaacgtacgttgcaggacacgatgttccagttgccgagtttggatgatgtgaggcaggtgattgtggacaaggcgtccgtagagggttccagcacgcccaaactcctgcgcgaagccgtggatgtgccgcagggacgtctcaaggttgcgcagtcggttttgcttgaccgagtccgtacacacgaggcgtgaggccagtaaatacgccgttgcggcggcgattaagatgaatgcgactcgccgcaacacgccgagttgcattcagctgaacggcgtgtattatatatcgagttgtctgaaagacaacatgcgccagtagcccagcggattagagcagctgactacggatcagcaggtcgcaggttcgaatcctgtctggcgcactcccgaaccacggggacaacagtggtatgcgccagtagcccagcggattagagcagctgactacggatcagcaggtcgcaggttcgaatcctgtctggcgcacagtaagcctcgaaagcgaaatgcttccgaggcttttccaattgtattggcccgtctgagtcggttgagtcggccacacagggttgggctaaggttgcccttcgcgactcagcccggagcggaacgtcctgagatattccgtactattacatacggttcatccaagagagtgcagcaaggagacgcgatggccacgaccgccggcgcgaagaagggactttggtccaccatcaggcgaatcgccgcctcagaccgtatttccggactcatcatgcttggcttcgcgctcaccggcctggtgctcgcgaatctgcccgccaccgcgcatgcgttcgagaccgtagcggaaacgcatctgttcatcccctacaccaatctcgacctgcctattggccactgggcccaggatggtctgcttaccatcttcttcctgaccgtgggcctcgaactgaagcaggaactcaccaccggctcgcttgccaatccgaaagcggccgccgtgccgatgctgtgcgcggtgggcggcatgatcgccccgcccatcctgttcctggccgtcacggcattgttctctcagatcgggcctggtgaacccggcacgctgattctgaccaccaccggcagcagcatcccgttctcggagatgtcgcacggctgggcagtgcccaccgccacggatatcgcgttctcgctggccgtgctcgccctgttcgccaaggccctgcccggttcgatccgcgcgttcctgatgacgcttgccaccgtcgacgacctgctggccattattctgatcgccgtattcttctcctcgattaacgcctggtattggttcatcggcatcgccgtatgcgccgccatctgggcatacctcgtgcgactgaaaaaagtgccatggaccgcggttggcatcgtcggtatcctcgcttggatcatgatgttcgaggcaggcgtgcaccccacactggccggcgtgctggttggcctgctgaccccctctcgtgaaatgcacggcgaactctcgccgcgtgccgaacgctatgccaacaagctccagccattctccgcactgctggccctgcccatcttcgccttgttcgccaccggcgtacacttcgagtcgatgagcccgctattgttggcctcgccgctggtcatcgcactgattgtggctttggtggtcggcaaacctctgggtatcatcaccaccgcatggctgtccacgcatgtgggcgggctcaagatggccaaggggctgcgtgtgcgcgacatgattcccgctgccgtcgcctgcggcattggcttcactgtgtccttcctcatcgcttcgctggcgtacaagaacgcggaactttccgctgaggcgcgcttcggcgtgctggtggcctccctgatcgccgccgcgatttccggtgtgctgctgagccgtcagtccaagcgattcgagaagaccgcagccgcagcagcggctgatgcggaggatgacgaatcgattgatggtgatggcatcgggcagccaagccacaccacagagcccaccacgcccacggaacaccccggcaccctcgccgacggcaccgccagtgtggaaatcgtcttccgccactgatggcttagacggtccctactccattgttggccttgtttcgtgaaaaccgtacgctgagacgcgctcaccgtacgttcttcacgagatgaggccttatttcgcggaaaacgtacgctcagtgtcgctcaccgtacgttcttcacgaagtcaaggatgatttcgcggaaaccgtacgcagagcttcaggcgctagaatgcgaagagtcgatagcgccgtacaggaggacattggatggcaaagaagcagaagaaatccaagaagaacgacggcaaaaaggccgctgaagcaaagaatctagccgaggccgcatccaagtccgcagtcgtggacgatatggaaccattggaagccacagccgcgaatgatgcggcggcgttggcggctgagacggcaactgaggctgcggccacaccggtgaacccggttgatctggaggacgcctcgccgctgggcgacacctatcatcgcggcccggtgattctacgcggccagatgattccctcggacagcaccaccgccaacctgctgaaacccgatcaggacaccgactggctgcacatggacccatggcgtgtgctgcgcatccaatcggaattcgtggacggtttcggggcgctcgccgagctcggacctgcggtctctattttcggctccgcacgcacccagcgcaccgaatcgatctacaaggcagcacggcgcatgggtagccagatagccaagcgcaacatcgccgtcatcaccggcggtggtcccggcatcatggaagccgcgaataggggagcggcactggccggcggcaaatccgtgggacttggcatcgaattgccgcacgagcaggggttgaaccagtgggtgaacctcggcatgagcttccggtacttctttgtgcggaaaaccatgttcatcaagtattcctccggcgtgatcgtatgcccgggcggcttcggcacactggatgagatgttcgagctgctgaccttggtccagacccacaaggtggcgaatattccggtggtgctctacggcaaggaatactggcaggggctctttgactggctcaacggtccggtggccgagcacggcatgatctcgacgatcgacccgaaactggtcaccgtaaccgatgacgccgacgaagccgtggacgtggccgtcagcgcaattgtgaggtaagcgagatagagtggctcccctcggagaggggagccaaggacagagttactttttgtaggcgatgagcaggccggtgccgtcaggggtgagcgtggactcgaaaccttcgtcatcttcgacggtggtgagcagctcacgcatggcgatggccttgtcgctgcggtcggccggattgatcacgccgccctgaccgtcctccaacgccagcacatcggtgaacatgatcacgccgtgcgtgcgcagcagacgggaggcctgggcgaacgtggcggcatagttctcggcgtcgcccgccaccacgatcagatcgtaatcattggcgttgaggcgcggcagaaacacgctggccggggcgttcaccgcacgcaacgtggtgtcggtctcgtcctgcagctcggcgaacgccttgcgaatcagcgcgatgccctgggcggtggaatcgaccgcagtcagcaggcccttgttatccagcgcatgggcgagctgcaaggtctccaccagcgagccggtgcccacggcaatcaccgaagcggcgctggtgatgcgcaccagcatgcccagcagacgggcctgcgccgccgaaccctgcaactggccggactcgtcggcggccgtacgggtgtcggtcaacgcatcggattcacgttcgcgcgcgtgttcctcggtgaattcccatgccttggcgaggttggtgtactgcgttctgtccataattcgttctttcatgtcttctctcgtgcgggcacccggcggatgcatcgacgcatgtgcttaggcgatcgccgcagccagccgcggcgcggcttagcgctcgcggaccttagccacgatctgccacatctcctcgcccacatcgatgccgcgcgggcagtggcgggagcaggcgcgcacggactggcaggcggccacgccgtcggcggtgtcgatggcatccatacgctccatggccttggtgtcgcgcgaatcgttgacgaaacgggaggcccaaatcagcgcggccgggccgatgaaggcgtcgccgccggcgtacaccgggcaggcgccttcgcacacgccgcaggcgatgcagttgctcagcagctcgtatttggcgagttgttcggggttctgcaggtattcgaacacgtccaccttgccttcggcggtggtggcgagcacgccgtccgcctgaagatacggggtgagcttcctgatctggttgagcatagggtcgatgtcggcgatgaggtcgcgctgcggcgggaagccgggcagggacgccagttcgatgactcccagcgaaccgtttgcggctgagttctggtcggccgccgcgtttgcaacgttttccgcggaatcgtcggattcctcagcctcggtgccggtgtgtcggaacccttcgtcatcgacttcgggcatggtgccgggttgcttggcccaatcgcggatggtggctgtgcacagcagggtgggggtgccgttgatggccacggcgtccgaaccgcacatgccatgaccgcacgaataacggaaggccagcgtcgggtcgacggtgcgtttgatggtcagcaggcagtcgagcacggtgtccgaggggcgtgcgggaatcgtgtattcctgcacccactgcttgccgcgcggacgacggcgcgccgccgaatccgagccgccgccgaacggggagcttttcttggcaaacgggctgccaccgcgtgcacgttcggcacgctcgggtcgcggcgtgaaacgatgcacttgcagggtaaccgtcgtgttgctcgcctcagccatgttctgcctccatgaaacagtgggatgtcaagtccaatattagccaacctattgtgccacaagccctaggcggcttgggtattaccaccagcggatcagtactcgcgcttcttgggcggatagtcggtgatgtgcaccggcttgaaacttaccgaaccatcatcggcgaccatcgagtgagcaaggaaatgctcatcgtcgcgttcggggaaatcaaggcgttgcatggatccgcgagattcctgacgggattcggaagcgtgcagcatggcctcggccagttcgatcagatgacggacttcccagatggcggtgacctcctgattgaaagcggcggtcttgtcatgggcccgcaaggtatcggcaaccggtgtgatgtcgttgttgatctgagtcaacgccgtatcgatggtctgagcggtgcaacgtacggccagagcctgctccatcactgatccgagttgggccatgagctgataaggattggcagtggtcgtcccatcgtctgaatcatccattggtccggcgagcagttcgtcaagctctgctttgcgggaatcggcagcctgattggcggcatcggtcagcatgtcgtcggccgaatcatcggccatgggggagtcaaccgggttctcgacgatgcgtgcggccatcgtctgaccagcgcgtgtgccgaacaggcaggcgtcgagcagagaattgccgcccagacgattcgcaccatgtacggagacacaagagcattcgccagcggcgaacagtccatcgactacctgcgcggcaccgtcggcccaacggtacacctcgccgtcggtggtgatggggatgccgcccatcgtgtagtgtgcagtgggcttgatgggtactaggtccttggccggatcgaggttcgcgtactgctcgatggtttcgaccacctgcggcagcacttccttcatacgttcggggtcgatgccggtcatatccagccagacgcagtccttcggaccatccgggtccttcgggtcggcgacgccgcgaccggcgtcgatctccgccatgatggagcgggagaccacgtctcgtgcggccagatccttatgctccggagcgtagcgttccataaacggctcaccgtcggcgttcctcaggatgccgccctcggcgcgggccgcctcggacagcaggatgccggtgtgcgcgagcccggtggggtggaactgcacaaattcgatgtcctccagctgcagaccggcggccaaggtcaaggccatgccgtcgccggtcagatcccaggaatttgacgtggtgtggaacagtcggcccgcgccaccggtggcaagcagcacgttgcgcgcgtggatggcctgaatcttgcccgaatgcgtgtcaaaggccacgatgccggccgcctgcttgccgtcgtcggcgagcaccaggtcggtcacataccattcctcggcgaactcgacgccggcggccacgcactgctgccacaaggcgtgcagaatctggtggccgatgcggtcggccgcataggcggcgcgcttgaccggggcgccgccgaactcgcgcgtgtggccgccgaaccggcgctgggcgatatgcccgtcctcggtacgggagaaggccacgccctgacgctccaggttgatcacggtctgcggcgcgtattcggcgagcagtttggccgcatcctggtccaccagccagtcgccgcccttgatggtgtcgtagtaatgccagtgccagtcatcggactccacattgcccaggctcgcggcgatgccgccctcggctgaaccggtgtgcgaacgcagcggctgcagtttggagaccacgaggatcttcgggtccacgccttgttccttgagctcggtgatctcgggggagcgcagcagtcccaacgccgccgacaggccggccgctccggcgccgacgatcaccgcatcatacatatcttccaaacgtttcggactcatgggttcgattctcgcacacccgccgaacagccttcgagccgtgtcatggaagccgattagccgacacggctgctcagcttgagcatcccggcatcccgctcgatcactcccttcagctccaatgcgccgagtagctcaagtatggtgccgatattgggaatctcgtcgggtaccgtctctcgcgccacgcgcaatagtgcgtccggggtgacgatgagatgtcgtttacggcattcacgaatcaatgccactaatgtgcgttccatttccggcagcttggcgataatgatacgttgttgggcttccttctcgggatcgggcttcggcttgacacgaagatccggcatctgatgcgacgagggcagctcttcacccttgcttttgtcgttaccggaatcggcggttgcgctcgccggcccatccttggattgagtgcgcgtaggctgagtatgcttggtcttcgaacgtttcgaatgacctgaatcttgtgacgactcctgtgacgccgatgattccgaggatgctggcgataacggagtcgttgccggcacttccatggcctcctcgttttcgggcgagtcctgacctgtggatttcgatatgcccgggcatactgccataacgggtttgtgccgttcatggcatatatcctcggtggatgtggcggcacacagaatcatcgctcggtggtcgccgatcatcttattgcacccggcgttgcaaggctgattgatgtcaccgggaaccgcatacacttcgcgcagcaattcgcatgcccatcccgcggtgttgagcgctccggaacgcaaccgggcttgcgtcacgatcaatgtggaagacatggccgcgataatgcggttgcgaagcagaaaacgacgggcttcgggaatcgtcccggggcacagttcgctgatcagtgcaccgccttgcgcctcgatacgttcgaacagcgtgcggttacgcatcggtccgatatggttgagcccgccggcgaatacggcaacggttctgcccacattggcgggcattctgccgtgcagcgcattcaacgctccccaatgtgccgccgcatccgtgcccatcgcgcctccggacacgaccagatgcccggcaacggctgcctgttcggctacggtgtgtgccacataccggccatattcggtcacgtcccgtgaaccgacgatgccgaccggtttggcgcaactggtcaatgcgcgtggatcgcctttgatccacaaacacagcggtggcgcccaatcggagcgaatggacaggtcggccaactgcgagggccaacatggatggccagggccgataatccattgcgtgccatccatagtgaaccagtcggccagttggatgatgtcttgcgagggcaggtccatcatgcggttatgccagccggccagtgcattgcggaaggagcgcatcgcgttcgccgacgccttgcggccccatcgagtgaggccgtccacgaacatgcggtcaatacgtgacagcgccgggccacagatttcagatggctggcttgggtgggattgcgccaacgcatgccagagggattcggcgttttccgcgcctttgagcgcggcgtacatcatcacatccgcgccatcaagacagaacgtgagcgcggcacgatacaacgtatccgtaggaggtacgggaatggtgcgcgaaacagcgagacccgtatcggtgtgatccacactttttgcggtgccgccagattgccggatatcagtagcgttactcatgtcatcctcgttctcatttcgatgccctgatggacgtcctgttcagtgggggatacgcggccggccagatcggcgagcgtccaagacagacgcatggcgcgatcagccccgcgcaatgtgagttgatgattggacagggcccgattgaccaattccatcgctttcagcgatgtattggcatgcagccatttgcccgaagcttgcgcgttgcacacccatccatactgtctgaaccgatctttggccacttgacgggcacgaatcacacgagcttgtatcccggcactggactcgccgattggctcgctttgcacggcaatgcgcgagactggtggcaccgccatctgaatatccacacgatccaatatcggtccggacaatcgcgagaaataacgtatacggtctttttcccggcaagcgcaacgttcgccggtgccgtaatagtatccgcacggacaggggttggccgccatgatgagttggaatgaggccgggtaataggtgctgccttttgaacgggaaagcgccacatacccggattccaatggttcgcgcagcgtctgcagggcgcgtgcgctgaattccggtgcctcgtccagaaacagaatgcctcgatgcgcgcgcgtgattgcgccgggaacggcgatgccgctgccaccacccaccaaggccgccgtgctggcggtgtggtgcggtgcctcgaacggcggcatgtcggtgatgccgtactgaggcagtatgccgcacagcgatcgaatcgatgccacttccagttgttccgcctcgttcaacggacacatgatgccgggcatacgtgaggccagcatggttttgccgctgcctggcgggccggtcatgatgagattatgcccgcctgccgccgccacttgcagcgcccatttggcatgctcctgacccagaacctcgttcatatcgccacaatcgttgggatgacttgtgggcgattgatccgtggtggtctcgtcggtaaccggtgtatcgggaatcgtataggtggcatcgccgcccatcagttcgatgagctcacccacatgcctcacgcccactacatccagtccatccaccatcgaagcctcgtcaagattgcgatggggaacaatcattttgcgcacgccacgttcctcggcatgcagcatgatcgggagcagcccatgaatcggcagcaccgagccgtcaagattcacttcgccgagcacaatggtatcttctaggcaatcatgccctatggcacccgccgcacataggacgctggccgcgatggccagatcatgcgacgaaccgcgtttgggcatggccgcagggctcatgttcacggtcacacgggtttgcggccaaccgaatccagtggcttgacacgctgatttcacgcgctcgcgggcttcggacaacgatgcatccggcaatccgatgatgctgaagtatggcaagccagggctgatgaaagcctgcacttggacgatgaaggccttaaggccgatcagtccgactgagagggtgctgccgatagccatgtctactcctttcgcaatgtgtttcgcaacgtggctgttttttttgggggggggcttcagaaggcattttcaatgtgatgcacgagcggcctgcccacccgaagcacgatggtgacgacatcgaaacggaccgccgaatgcggcacccgattacgccggtcaagcagccaatcgcaggcggctttcctgagattgtgctgtttcgccggcgtaatggcctcttgcggatatccgtaatgcatggaccggcgtgatttcacttcgacgaacaccaccgtgtactcgggattgagcatcacgatgtccaattcgccgtaacgggtatgccaattgcggctcaaggtcgtccaaccgtgttcctccagccacgcggcggcatactgctcgccgagcgcgccgaactgtttgggcgtcagattgcggtcgcccatcgtggccgcaatccgttccgaaggcagcattgcctgcggatcaggtgaagccagcatgggctggtgaaaggcaagaccggcgtcgatgccggacttcgtcgtcgactgggtaggtggtaaagcgttcatgattccactgtgcgggttacttatgtaagagcacaagcgcaaccggcaaatgtggatactatgacgcggtttggcgtgttgtggataacgtgtggatgaaaacccggttatccaccattagttcagaaggtttaccaaggctcgccagtcgacttccctgtgacgaacaaacaacccatcggattgttcgttgaatacgtcagacccagtgagcggagaggggagccaaggtgcggtcacttcaccaaatcggtgagttcgccaaggttcagttcgaagctgacgccacgatcctcgaaatgcggctggttacgggtgctgaccatggcgtggcgcacgaactcaccggcgatttcggccgactcggccaagccgcggccggccatcaccgcgccgcacagggcagaggcgaaggcgtcacccgtgccatgaatcatgtatggcaacttctcatgagccagctcgatcttgccggcaacaccagtggaagcgctggccacatagttgacgattttgccatcgccatggtcgatgcccttcagcaccacgttcttggcacccaactccagcagagcaccaagcagctcgttaaccgtggcctcatcaatatcctggccaggatagtcacgcttggtgagaatgctcgcttcggtgaggttcggcatcaacacgtcggcaccatcggccagcgcgcccattgcctcgcacagctccggtgtgtacgtggggtacatttcgccggcgtctcccatcaccgggtcaaccagacgcagcgcgttcggatattcgcggtagagacgctgaatgattgccacctgatcgggggagccgaggaagcctgaatacacgccatccagctccacgtcttccttctgccaggcatccaagtaaccggagagaatatccgtggtgtcatggaacgtgaacactgcatagcgcgtgtgcgccgagaacagggcggtcggcaccgggcacacatcgcagccggcggccgagagaatcggaatcgcggcggtcagcgagcacttgccgtagccgcacatgtcgtgcacggcggccacgcgcggaatatagttcggatcacggtcatacagtgttacatcggtcatgtctgttcgaatcccttcaccatgttggcggaataattcattggcgatgtttgactgtagtcgttcgtcatgtaaaccatgtaaccgggcggcagaaaaatgaaacagacgtcatcaccgagcgggcaaaccgtcttggtgacgggtggaacaagcaatcatcacggacgcttgagccatgcgcgaaaggcatggtagcgatatcaccgtgaccgcagtcgaccttgaaagcgcatgcgtgcggcccggcgtgtcgcgataatttcaacgactttttcgtgacttctgacagtcgctcacgtcaatgattccaaggctttataagcccttataggcaagtccgataacgttcagcttgcgtcgcgcggcccaagcgtcgtaacttcataaccaacacctcgccaaccgcccgaacacggcaggcgggtggcaaggaaaaatcctcgcgacctagcacaaccaaggagaataccatggccgagaacaacaagaagtaccgttttgaaaccctgcagctgcatgtgggccaggagcaggccgacccggccaccgattcccgcgccgtgccgatctaccagaccacctcctacgtcttccacaacttcgatcacgctgaggcccgattcggccttgccgacccgggcaacatctacggccgtctgaccaactctacccagggcgtgttcgaagaccgtatcgccgctcttgaaggtggtaccgcaggccttgccgtcgcctccggtgcagccgccgtggaatacgcggtgcgcaacatcacccagtccggtgaccacatcgtcgccgccaagaacatctacggcggcaccttcaacctgctgcgccacactctgccgcgcgacggcatcaccaccaccttcgtttccgctgagaacccgcaggagttcgaggatgccattcaggagaacaccaagctcgtctacttcgagaccttcggcaacccgaacgctgatctgccggacttcgaggcaatctccgaaatcgcccacaagcacaacctgccggtgattgtggacaacaccttcgccaccccgtacctgttccgcccgctggagcacggcgccgacgtggtggttgaatccgccaccaagttcatcggcggccacggcaccactttgggtggtgtgattgttgaaggcggcaatttcgactggaatgcggttccgggcaagttcccgaccctgaccgagccggacccctcctaccacggcctgaacttctacgaggctctcggcggcaccgccttcgtgacccgtatccgcgccatcctgctgcgcgataccggtgccaccctgtccccgttcgccgcattcttgctgctgcagggcaccgaaaccctgtccctgcgtgttgagcgccacgtccagaacgcgctgaaggtcgtcgagtacctgcagaccgtgccggaagtcgagtccgtttcccacccgtccatcccgggccgtccggatcacgacctgtacgagaagtacttcccgaacggagcaggctccatcttcaccttcgatatcaagggcggaaaggatgcggctcgcgtcttcatcgacaatctgcacctgttctctctgcttgccaatgtggccgacgcaaagtccctcgtcatccacccggcttccaccacgcactcccaggagaccctggaagagctcgaggatcagggcattcaccagggcaccatccgcctgtccatcggcaccgagaacatcgaggacatcctcgatgacctgaagggcggcttcgaagcccttcgcacttccggcttggccaagtgaggtcggcaggaaggttgacggcccgatgagaaggggcgcgatgctaatggggtgcatcgcgaatcatcgagccgcatggggtgccttccgtctgatcgcttgacccaaggaatagaaagctcgcactgatgtcatgcagtgcgggctttcttgcgtctgtatgcctcacactgtttgcgcagaggcatgaatagtgtgagacctgagacgacataatcctcaaggatgagggccggcgcgtggccgaccgcccaattcagtctggcgcacgatgtggcgcgccgttatttcttcataagttggaatcatcatccgggcataaggcccggccaaatatggagagacattatgaacgtgcagaacccggccgcatcgcgcggcatcgctattcaggccgtcgacttggtcaagaactacggcgctggcagcaatatggtccatgccctgcgcggcgtgaacgtgagtttcgaacgcggcaaattcaccgccatcatgggcccgtccggctccggcaaatccacgcttatgcacacgctcgccggcctcgactccgccacatccgggcatattcttttcggcggggcagacctgacccgcatggacgacaagcagctcaccttgctacgtcgccacaagatcggcttcatcttccaaagcttcaacctgttgcccatgttcaccgccgaacagaacatcctcatgccactgactctcgccggagacaagcccgaccacgcctggttcgacctgcttgtcgataccctgggactgaagcagcgcctgaaccaccgaccgaatgaactgtccggtggccagcagcagcgcgtggccatcgcccgcgcgctgattaccaagccgaagctggtgttcgccgacgagccgaccggcaacctcgactccgtctccagcgccgaagtgctcggcttcctgaagcgttcggtcaacgaactcggacagaccatcgtcatggtcacgcatgatgcggtcgccgcgtcttacgccgaccgtgcgctcgtgttcgccgacggccagatcgtggcggacgtgaacaagccgacagcagaccagatgagtgaactgctgatgaaggaacgcgaagccgccacaatgaatgtggcttccgcgagacattcccgctaaacgcactgtagaagcattcgaagaaggaaacagaattaaccatgtggtccatcactttgaaactcatgcgaaaaaccaagcgcatgctcatacccgcaggcatcgccatcatgatcggcacggcgttcatcgccagcaccttcctgttcggcaatgccatgaacgactccctgacacggcagatgaccgccatgttcggaaacgccaactatgcggtgaccgtcaacagctccgacctgagcgatgaggaactcaacgaagcgtactccagcactgtcggcgacttccatctcgaccagatcgccggcatcgaaggggttgacggtgtccgcgcctcggtggaaaccggcgtcagcgtttccaggggggacagcgccatcagcggcgagatcatctctaccgcggcacagaagaacatgcttcccgtgaatattacggaaggggaccagccgaaggactccaacgaagtcgcactgccggaagacatggcgaaacagctgaacgtcggcattggcgacactgtaagactgacctcccaatatgcggtaggcaccgatggcaaagccaaagcggacaacgtgcgcgtggtcggactcacctccgatccgaacggcgcctactcgtactatggtggtgcgatcgtaggatccgacaatctgcttgccgcaatgcagggaacggacgatttcgacaccaccggaacaacaacggtatacctcgaccttgccttggatggaaatagcgtatccgcaaaaaccatcaacagtgtgaaagcgttgctgccaaagcatttcgatctgatgtcgcgacagcaggtcagtgacgaaagcatcaaatccttaaccggcaaccaaaccagcatcgtcaccacattcctcatgtgcttcggcgtgcttgccatgttcgtggcggcactggtgatcgccaacacgttccaagtactcgtggcgcaacgccgccgcacactcgccttgctgcgcaccatcggcgcgaaaaaaggccagctgtatggttccgtgctgttcgaagcggcagtgcttggcttcgtcgcatccgtgcttggcgtggtgctgggaagtctgctcatgtggggcatgtgcgtcagcgacatcatgcaagagggtatgcgattcaatttctcttggcaggccgccgtcatgcctattctcttcggtattgtggtgacggtgctcgcatccctgggatctgcacgttccgctactgcggtgacgccattggaggcattgcgcccgattgaactgaccgacaaccgtcgttccagcctcacgcgagccataatcggtattctgatggtggtggtcggtatcgccatggtggtattttccatctggcaggtacaagccaccaatggcggcgagaatgcgagcagcgatcaattcacgatgattctgctcgtagccatcgccggcgccgcactggtattcctcggaatggtggtcaccgcggtgttttggatgccggccctcatgaagggagttggagcgttggcctcgctgacaggcccttccgcaacggttgcgcacgccaacattcagaagaatccgcgacgcatcgcagcaaccggtgccgctctgctcatcggcgtcaccctggtttccaccatcgcaaccggtgccgccagcgccaaagagactatgaatggtgcgctcgccacccgttatagcgtcgacatcgtggccatgggcgatgacatcagccagcaaatggtcaaggatgtagccgacatcaacggcgtgtccgacacgttgtatgcgccggcggtttccgtgaccttggagaaagcggatggaacccagcctacgtccgcattgctggtcggcgtgaagaatatcgatcaggtcaagcaggtcatgcgtgccaacttgggtaacgcctccatcgacagtgatggcgtgctcatgccaacatacaatgcgcaaaccggcaaggaactgcagttcgccaatggcacggctgatttctctaccgaatggaaccaggacggcgacgctacgcgttcgctgacattgcaagcaaaccaagccgactaccgtcgcgtatccgcacagtatggagctgtcggattcgtggatgaaagccatttcaccaatggtgacctcgatgccgccacccatgtgctgctggtcaaggcggatactgacaagtcgggagtttccgttgacggcatctacaacgacatgcaggccgcattggaaaagagcactgatgcgacagtaaccggaccgatcgccgaacgcatcgtatgggcgaagatgatcgactccatgatgatgcttctggtgggattgatcgccgtggccgtgctcatcgcacttgtcggcgtggccaacacgctgtcgctgtcagtgatcgaacgcacccgagaatccgccacactgcgtgccatcggcatgactcgaggccagttgcgacgctccctcgcggtggaagccctgctcatctcgctggtatccggcatctcgggcgtactacttggcacactgttcggctggctgggcgcatacgtggtgttcagcatgtacggcaaagtggtgttcccgttcgaatggggcattaatggcatcgtactcgccgtggcagccgtggcagcactgctcgccagcgtattccccgcacgcagggcagtgagcacgcctcctgttgaggcgctcgccgaagcctaagcttcatagcaaacacaacgaaaaggactcctgccacaaacatggtaggagtccttttcgcgtatcatgcatacgcagaacaacaaatcaatcagaccaaatggttttcgtaagcgaacaccaccgcctgcacgcggtcacgcgcattgatcttcgccagaatatgcgccacatgcgttttcaccgtcggcaggctgatgaaaagcttatcggcaatctcctgattcgacaatccatgcgcgatctcaataagcacttcgcgctcgcgatcagtcagttcatctaattccggatcggtgtacgtcgaatcagaagtggaagaagcagtagaatttccatgtgcaccaacattcgcagccatgaaatcgccttccatcattttctcgataagacgtttcgtggcggacggtgcgataatcgcattaccttgaaaaaccgtgcgaatcgaattcaacaacgtttccggttccgtatctttcagcagaaaaccggaagctccagcagtgatcgcagccataacatattcatccaaatcgaatgtcgtcagaatgatcactttggtatgagtgacttctgattgcgttccatcggcagcaaagcgatgctgcaacgcactgatttgccgagttgcctcgataccatccatgccgggcatacgcacatccatcaacaccacgtcaggatgcagcgtttccgccaacgccacagcctctgcaccatcgcgagcctgcgccgcaaccgccatatcaggctgggagccgatcaccatggcgaaaccggcgcgtaccaattcctgatcatcggcaatgaccacacgaatcttctgttcttcactcatactctccaccttatcggcattgttccgctcacagcgcgaaacaaacccttaaatctccctgaaaaacttgaatcggctatcgaggcacgcgctgcagctgctcctccaatggtgctgcgggcctcaactgcagttcgctcgcactaccggcatgagcgtcatcgctgaaaccagtctcacgaagcacgccaagcaattcgcgcatacgcttaagcgcggcgcgcccctgctcgccaatggctttgaacgctgcggaaatctcgtcggcggtagtctctttgccttgtgcttcggcgctatccagcatgcggataccatcgacggcttgactaatcacgctgttcaacgtggcggtgacttcagcctgaatgctggcactgatacggtcacgttccatattcgccgcgagaatacgctgcttctcctgctcggccaccagtgcctcttcgcgagcctgcaacaccagtgcgtttgaatcactggaacgcgcccaacgtgcccacgccatgatgccggcgcacagcatcagcactgcaaccgtatacatgacgccggtaaagaatgctgcactactacttgacgtggctgaaaccggttttgttaagcccacggaagcggcgatggtgccgaacaaggtagtgtatccgtgttgataagccgcgattttcaagcccatcagcaccgaacaggtagcggcggcaagaccggcccaacgccatgcgtgttcacgcccatacaatacggctgaatacagcgcacacagcgacgctacgatatgtccaacctcaatcgactccaaaaacaccaattgcacaaccgacaatacgaacacaataagcgcgcaagtctcggggaaactgcgtcgaagagccagcgccagcaagcagcatgcggcgatcgcatgagagagctgcacatgaggtgaactatcaaaaaagaacgtaatcgacatgcgattcagcagcatgaccaatgccacggcatcaacggaatccatgagcgcataatggtgctgcgtccacgcggaaacacgttccacccaattcagtcctcgtgaattggatgtatttgcaagttctacggatttcagtttcaacgatttgagcaaatcatgcagattgggtgcggtgatgcgcaaatgttgcagggcattcgaacgatgatcgcgaccggtcggttggttggtttcctgcgtccgctccgatggttgatctgggattcgcgccgatatgttgacgactgtgtgaggtgcgattgcttcgtcggagaatttcgctttgttggatacggcagttgtgttgcacgattcggactgttccgatgcatactgttcgccggtttcgtctgtcacctgttctttaccgccgtaaggcagggtggccatgacttcaaagcctccgccgagttgagggccagcctgcaacgagcctccggccgattcgatgcgttctttcatgcccagcaggccgtaacctggcgtatgcccgtcgatattggccgccgcgccatgaccattgtcggtgatggtcaaagtgagcaaaccgttgttccatgactctttaatgtgcacatcgacgtgtggccccgcatacttgcggatattcgtcagcgcctcctgcactacatggtaggaagctatcgaggcttgttcaccgagttgttccgggcaggcgctgccggtgatattccgttggattcgaatgtcgggggagacgttttgcgcttgttccacaagattgccgatatcgttataatcggcgtgcggtgaacctccgaatactcctagaagacgttgcatgtcatgcagtgcgcgttccgattcgtgtcgaatcgtctccatggtgtttctggccaccgcgggatcatgcgtgcctgcatagcgaccgccatcagactgcacgatgatgattgacagggtgtgcgccaccacatcgtgcatgtcacgtgcgatgcgtgcgcgttccgccaacgcggcgatatcgcgttcatcctggtctcgcgcggcgattgcctcattgcgttcccgcatcatgcgaatggttgccagacgggcacgctgccagaacgctacaatgacggtggaaatgatacatacttcgaaaatcggcgtcagcaccagcatggaatgcgccaccatgtcggcgacttccgatatggatgttcctgtgtagatggaaccgagagtgtcttccgtgaccataacgccatttggatttgagtcattccagctgctccatgtatgcactttgcctccggtgagcagtggtccattggtcatggtccatgccatcagcgccgcagccagaagaccgatggtcaacgccagaataatgaaggctttcgtgtttttgggattgccgtagacgatcactgaatacagcatgaacaatgccagaatatcggtgcccaacaggcaggggccgaatatgagatgcgccaaggtcaatgccacgcagagcaacgctccggtctgtggccaccatcgacggattagcagcggaataagcattgccgcttcccatgtcatctgcgtggaaggcttaaggtcaaacagcaatcccggattataggtgatgccgctggtcacgccgaacagcagaacacctataacaagcgtgatgatgagatcgcctgcgaagacatgaccatgcatccacgacaagagacgctgcttgaaattcgacatatgctccaccctagcgccagatatgctgtgacgccatcatgcgcaggaatgaaatagcggtaaggtaaagccgcttttgtgaggtaaggttgtccccgcatgtgggtgagatggaagccatcaaaaagtcactactcgcattgaatatgccgatgacgccaaaggaaaggtgaatgcatgacgttgctgagcgaatactacgtgcccggattgcatattgaggatcgttccatcaaggtgccattggattggaccggtcatgagccggggcatgggttcgatggcgaatcgatcagcctgttctaccgtgtggtcaccgctcccgaacatgtgcatgatgatcttccgctgctcgtgttcctgcagggtggtcccggtggttccggcccgcgtccgctcagcccaagttccgacgggtggatcgaagaggccatcaagcatttccgtgtggtgttgccggatcaacgtggtactgggcgttcgtctcgtgtcgatacgcatgtgattgaggacatggatggcggcggcaaggccggtgccgcgtttttgaagcgcttcctcgccgattcgatcgttcgtgatttcgagcatctgcgtcgtaccgaattcgggggcgcacgttgggccacgcttggtcaaagctatggcggattcctgacgctgacgtatctttcgctgttcccgcaaggggttatcgccagtttcaccacgggcggcattcctcatgttcccgccgatgcgaccgacgtgtaccgtcatacgttcccgcgcatggcggcaaagacgaagcagttctacgagcgttacccgatcgatgtcgaacgtgccgcggccgtcgccgacattctgcagtcgcgcaaggtcgcgttgccgaacggcgatccgctcacggtggaacgcttccaatgcttgggatccgatttcggcatgaagccaagtttcgaacgcgtgcattggattcttgaccaggcattcctcgacggcgacggttcggcctcgacctcggcggaactgtctgacgaattcctgtcttccgtgatggatgcgacctcggctcgcccgctgtactggccgttgcaggagttcatctacgccaacggcgagctggaaacgccgatttgctgggccgcccagcgcgtgcgcggcgagcatccggaattcgcgggtgacatccgtccgcttaatttcaccggcgaggccatgttcccgtggatgttcgagcaggaacgtgcgttgcgtccgttcaaaccagccatggacgtgcttatggaagacacgcatttcggcacgatctacgatgccgaccagttggcgcgcaatgaggttccgctgcaggctgccgtctatttcgacgacatgtacgtagattctggattgcagctcgacacgctgtcccgcgtcggtcgttcacattattggaccaccaacgaattcgagcatgacggcgtgcatggttccgtggtcttcaaacgcctgttcaacgaagcactgaacaggggagatctggaagaactgttctgacacagacaatccatccatatatcgatatcaaataggaaccgggaacaacaaggagaaaccatgtccaacccaaccatcggattcatcggatacggcaacatggcacaggccattgccgaaggacttgtcgcggcaggtgcaatcgacggtactgacatcgtggcgtgcgccgcgcattacgacaaactggagaaaaccacggcgaaggttggtgccacaccgctgcgcaccgctgccgaagtcgcagacgcggccgacgttgtcatcatcgccatcaaaccgtaccagatcgaaagcgtcatcaaaccaatcgccggcgcgctcgccaacgaaagcacattcgtcgtatccattgcggcaggctgggatctcgccaaataccgtgaactgttcggcgccgatttcggcgcgatgcacatccagtgcaccattccgaacacgccgatggccgtcggcaaaggcgtgctcgtcacggaaaccgacaacacgctgaccgccggacaaacggaggtgttcgagcggttgttctcgtcgatcagcctcatcgaacgcgtcgattccgcgcatatgggtatcggcatgtgcattgccggctgtgctcctgccttcaccgacatgtacatcgaggcgcttggcgatgctggcgtgaagtatggtttgcaacgcgccaccgcctaccgtctggcggcgaagatggtggagggcgtgggtgctctgtatctggcgaacgaaacccatcccggtgcgatgaaggatgccgtctgctcgccgggaggcaccaccatcaagggtgtggcctcattggaggagagcgcgttccgcggtgccgtgatcaaagccgtcgacgccatcgaagcctgatactaagctagggaatcatgtctcttactattggaatcgtcggattgccgaacgtcggcaagtccactatgttcaacgcattgacccgcaacaacgtgctggcggaaaactatccattcgccaccatcgaaccgaacaccggcatcgtgccgttgccggacaagcgcctgccggtgctcgccaagctggttcacaccgagaagatcgtgccggcaaccgtcaccttcgtggacatcgcaggcatcgtcaagggcgcctccgaaggcgaaggcctaggcaacaagttcctcgccaacatccgtgaggccgatgcgatctgcgaggtcgtgcgcgccttcgaagacgacgacatcgtccacgtcaacggcaaggtcgatccggccgacgacatcgacaccatcaacaccgagctcatcctcgccgacctgcagaccatcgaaaacgcgctgcccaagctggagaaggatctgcgcggcaagaagatcgagccggcctacatggacgcagtcaagcaggcaaagaccatccttgaagccggcgagacgctcgacaaggccgcacgcgaaggccgcttcgacaaggattccgtctacgacctgcatctgatgaccgccaagccgttcatctacgtgttcaacgtggacgacaacgagctggccaacaaggacctgcaggctaagcttgccgcatccgtggccccggctccggccgtgttcctcaacgctcagttcgaggcggacttgaccgagctcgacgaggcggatgcccgcgaaatgctcgaggacgcgggcttaagcgaatccggccttgaccagttggcccgcgtcggcttcgacatcctcggactgcagaccttcctgactgcaggcgtcaaggaggtgcgcgcttggcaaatccacaagggctggaccgccccgcaggccgccggcgtgattcacaccgacttcgaaaagggcttcatcaaggccgacatcgtctcctacgacgatttcgtggccgccgacggctccatggccaagattaaggaggaaggcaagctccgtcaggaaggccgcgactacgtcatggccgacggagatattgtggagttcaagttcaacgtttccaagtagggtgcgaacaccctagaaaacggcgtgattccaagggttccggggtgttggaactgtggaatcgcgccgtttttcgattcacggaaaaccgccgttttacgcacgtcttccgccgttttacgcacgtcttccgccgttttacgcggcgatagagtgtaaatagagtgtaattcgcaaagcgcggaggacactcgccgcaacgactcccgccatgtgcgtggacgctcattgagtgctctcggacacaaggagaacaccatgacggcgaagaccacacggaagacgggcggacgttcacggcgcacgaagggcgcggacggcatcatccaccgcgcggatggacgatgggagttccgccgcgagatcggccgggaccccgccaccggcaaacgacggttcatagcggcgagcggccgcaccaaggccgatgcccgcgaacggttcggcacgaaggtcgccgagatggaacgcaccggcctgctgcccggcgccaagagcccgtacctgaaggattacgcggagcggtggctggaggaataccggctcaacgtcaagcccaccacgtaccgcacccgcgccggcaggattcatgcgtgcatggaggtcatcggctgtatccgcctcaccgagctgacccctgaccatatccgccaatgcatgcgcgtgctttccaaacggctcgcgccctccacgctcaaggaccatttcgtgagcctgaagatgatgctcgaccaggcggaactcgaggagctcatccccgtggatccgtgccgcagggtcaagccgccaagggtggagcccaccgagaccaggatcctctcgccagaccagccgaagcagctgatcgaggccgtgcccaaccggggagcgaaacgacgcggaccggccctgaccgtggacgttgacgaatcctggatgctgctgttcgaactcgcgttcgcggccggcatgagggaaggcgaacgctacgcgctcatgccctacgagctcgaacaacgcgacggcgtgcccggcatcaacgtgcagcagcagatccagcaatacggcaaaccggaggacgccgtgatacccgcctggctcaaagccgagcacctgtacggtatcctgtggctcaccacatgtatttcgtcaagtcggtgtttcgtgtttagtcatgtatttttttcgggtttaggcagttgcatgcattttccttatttttccggttgcgcggaggtgttcctgccgaacatgagggcctcactgacgcggcggctctggccggtgaactcgaggagccgcccgtggtgcacgatgcggtcgatgatcgctgcggcgagtttgtcgtccgcgaagaccgtgccccatttactgaactcgatgttcgtggtgaatatgatgctccgtctttcgtagctgcccgcgatgatctggtagagcaggcgcgccccgtcgatgtcgaagggtacgtagccgaactcgtccagtatgatcaggtcggcacggccgatgtcccggagcatcgtctcgagcgtgccgtcgcgtttggccttgcccagctggaggacgagctcggcggtctgatggaaccgcacgcccagccccatgtcgatcgccttcatgcccagcccgatcgcgagatgtgtctttccgcgcccggtcttgccgtagaacaccaggtcctgcgcgcgcgggatgaaaccgagccctaggagctcatcgagcatgtagccgtcggggagcctgacgttcgtgaagtcgtagccgtcgagacccttgacgacggggaaccgggcgcggcgcaggagcctgtcgtgcttcgcgcgttccctgttcgccagttccgtgtcgagcaggcggtggacggcgtcgacctggcggggcgtggcccagccggcgaattcgtcgatgctcgccttggagatgaacagcttgcgggccttctcgtagagcccttcgtccgtcttcgtgttcatcgcccgccttcctgcacgccgacgtccgcggtgaacgcgatgtcgtattcactcagatccggcctgtcatcgtcgtattcgatacccgccacgccctcggcgagcctggccgcgagcagtgtgacaccggcgcggtccgccccgccggtcgattcgaggatggaaagcatcgcctcgaccgcgttcgcccacccggattccctgtcaacgcgtttgagggtctgcagcgcctcgttgcgtgtctgtctgtcctgccgatccagccattcccgcaacgggtccggcaacgcgtcacgtacccggctgttgggccaggacgcgggcttgttgcacagcagcgccaactgcatggacgggtcctcgctgttcgtgctggcctggccgtacgcccgaggatgggtcgccagatgcttgcccgacgagtcgaggacctcgacctcgagcgcgcggaggcccacgatcacccctctgcccgcgttcgcccggtccgcggaataacgatgccgtccctcgagcgtgaccacgccgtaccggtcggccttcatatgccgccacgtgaccacgtcgaaacgcttcccgggcaacggcagcagcgccgcacggtcctcggagaacaggccacgttcctccgtgtccttgcggtaatgcggtttcgtggccagctccaggcaccggtccggcagcccggcgttaaagttctccaggctccatacgctcggccggggcacgaacagcttgcgccgcaccatgccgaccttggactccaccgcgcccttctcatgaccggaatacgggttgcagaacgaacaatcgaacccgtaatgcgcctggaaggcctggaacaggtgcgtcaggcgcggctcgcgctccccgtaccccttatggcccacgccggcggcgttatcgaacacgatccgctccggcacaccgcccagccactcgaacaggttgcgcaacgccaggcacgtgcactcagcgttctcgcccggcatcaactgcaccagaccgacgttcgaatacgggaaatcaagcacgaaatgatgcatccgctgcaccacgccgcgcaacagcacgtcgacctcgccgaaatcggcctgcgcctcgcctggatgccataccagatccatgaacgcctcatcacgctccgccgcgaactcacgcctgagccgcgccaccgcccgcgtcaccgtggacagggagacctccgcgccatgctcgtccctcaaccgctcccagatcctggtcgcggtatgccgctgcttgcgccagttcgcgcgatcctccgcgagccactgctcgatcacgggcagatacgggtcgatcaccgacgcgcgcggctttctcaccgacggcacggccgacaaatcctccttcgcgaggtacttacgcaccgtcggctcgctgacatgtgttttccgcgcgatcgacgcgacggattccccgttccgccgcaaacgacggatagactgtacttggggcatgctgatcataatcctttccggtcctttctggcggagatacaagcaccatccagttaagaccattccgtggtcggcatgctctgcctaaacccgaaaaatcatcgtgactaaacccgcaacaactaattgaacacaaacaccacacccaaaacccacgccgcccaccggttcgtacccatatccacgagcctgtggcaacgattgtgggcgcgcatcaaacgactcgacataggcccacgcgacctcatattcaccaactcacgaggcaaccccgtgcgcagcagcaccgaacgctacaactggaacaaggccttgaaagccgccggcctcccgccggtcaccatccacagcgcacgccactggaccgccagcatgaccgcccgcgccaacatgcccgacgacgccagaaccgccatcatgggccacaccagcatcagcatgaccaaccactacacccacagggacgcggccagtctcgccgcgctcctcgaccgagccatccctgacctgcacgacgagagggatgtgatagacgcgcaggtcatcgaggaggggaaatgacgaacgtgacgcatagtagacttgtccgcatgagcataaagaaagtagacgggccacaggaccatcatcgatttatcgatgaggccggtgacatgaccttccattccgggaagcggggccgcaaaacctcctccatcgggatggacggagtttcccgatgcttcatgatcgggctcgtacatgtgaaaagtcccctcgacgatgctcgtgcgactatcgacggtttttgtgaggagatcaacagcagcaaattcttccagagctttcccagcgtccaaaagagaacaaaggagggatggcacggcttctacccgcatgccagcaaagatcctgcggaactacgctatgaattcctcaaactcatggcgcaggagatcgacttctccgcacgagtagttgtgggccgtaagataccggcgatctatcagcagaggcacaacgaacaaccacgtgaattctacgccgacctcatgtcccatctactcaaatactcagggaagatagatccgttgattctcgacgtcgcggaacgaggcagcagcacatcgaacctcaaccttcagcatgccgtggacatcgcgcaacagcgcagccgtcgcggcacggtaacgcatgaattgcgaaacaccaccaaattcaacgtccaaccgtatgatcacgaaattctcttggcgctcgccgactacagtctatggacggtccagcgagtgtacgagaagggagacgaaaagttcttcgggcttcttgaaccgaagattgtgctggtccatgatgtttatgattccagcagatatttcaaatcaaagaactattatcggccgaaatacaatcctctgaccagagcatccatcaacttcgacggatgggcgcaacctgaatggtagaaggaatggatggcccgtctcaactctagtcgtgctgtgacgacgacggcatgaagccgactttcgatgaaggacaggccaaaatccaataatacgaccagctgatccttcgaggggaaggatacctgtgtattcttgtcgctgatctataaatgatgatagacggtcatgtgggcggcagtcaagaaaatgcgacagattgtctaatcgtcgatatgtcgcagggccgccccggcgctcgcaaagagcgaccggggcggtttcgtgtttagggcttgatccgcccgacacgggatttattgcttggccgtcttgacggtgatggtggtaccgagcgcggtggtctcccagctcacgccgtccgcctcactgtaggtgaagtccttggtggcatcctgcgaggcgaggagcgcgctggccatggtctcggtgtcgccctggctggtccatttccaatcgccggctgcggccggtgcctgataggtgcccttccagtagaggctcttggtgtcggtgccgatccagtcgacctcgatggtgtcgccgctgatggtagcttccatgtatgagctcgggtcgttggaattggtctgcttccatgtgccggtcagatcggccggctggggtttgggctcttccttattggtctcggtctttgacgtgccatcggatttggccggcgcatcggccgtagtgcttcccccgcaagcggacaggccggtaagcaacatcgccgcaacaagcagcgcgattgcctttttcatgattggtctcccttcgtgccggacattgtcgtccgacatgactcaatcatatggcgaaacacaagaaccaaggactcatcccggtgctcgcggtgagtcgtcgggatgagtccttatatggctcggaagctacgcggcgagttccacgggagcccgctcttccaatttggagtaggggataacggcacaccgtagttgcggaacgcggtgagcgcgccgcgctgcaacggcgtctgccggtcgtcgccgatgactatcagccgggaatccctgcgcttgggatccttcttcgtgtcatcccaaccgaacatgatgtctttcacggcgtccttgtcgaatcggttcggtgcctggcagaaccgggtcggatggttggcgctaggacagcaccctcttctgttctgtaacggcatcagtacaatgttcgtaatgaacagttgttcacgcaaggaaatgccggcatatggtgcgtcatgttcaaagcatagagattcattatccggcctcaacgagaatgatttggttctagcgcaatacatgctttcacgacacatgccttcgtgatacatacgttggtcagaagatattgcgctagaactcagcagtcaccgcacgtggtccacgatgtcgttgaccttggtcatatcgatatcgcgctcgccgaatgcctgccgctcgtaggccaggtcgatgtggtgttcgtgtgcgtaatcgatgatacggcgagccaaatcggcaatgtcgccggacttgttgaaggaacgaccacgcagcagcacgcgttgcataagagggcgcatcgccttgaccaacttgtaccggtctgacttcaccttcaccatccaaccgtcggcaaaatatagcaccacgccttcatgcgggcttgccttggcgtcgccgattgcctgggcgacttcttccggcgaatggcagatcgccaccgtttccggccgcacgaagccgccggcaagagtgaacgtttcctcgtgagcggcatcgatggagaacgattcggcattacgaatcagatgcagcaagcgcagcccggatgattcgtatccaacgatgtgccggtcggactcgcgatcgatgacttcaaacgccgccgtgacattccactcatgcaacatacgccacaattcggcacgtaccgctgaatctgaaggaaacaggcgctcgataagcgcggaataatccgtttgccccgacttcgaccagaagcggaacaatccaggagttcccgccgcgcccacgagcccgagaaatccgttctccttgcgctcaacgcgcacgggcaacgactctggatgttcttgagcgtgattgacgacttgggcgaacgatgtctcctccgtctcgtccacagcaaagaacttctcgaacccgcgttgcaccacctgaccgttgccgccgacaaaaagccctcgcgcattgatggtgcgatccgtccaccgatgttcacgaaatgcctctgcagtgaaattgcacgcatacacgtctgtttcgccgcgcaccggaataacccgaacgtaagggtccgcgcgcatacgctccaacaggtttccattcggatcgcccggttccaacgggcggaacatcgcggtgtgaaaatgcttccaggacgaacgaatgtaatcttccggaacacggtcagcggtatcacgcgccgcattgcgacgcaacaattcgtctagaggaacgtcaaaatccctcgtttcccacagtgcgccatgacgttgagcgagtagcgccagttcggctgcataccggggattagcgtgttgcgcatccgccaccacatcccaccccgcatccaatgcgtcggcaatcatgtgccgtcccatggcaaccaccatgtcattgaatcgcttgccgtgctcggattgcagtcggtttcggacctgtgccgagccggcgatcatgagccgaatgtcatcgagagaaatcacgcaatgcggccacgtgttggcggggtcctcacaccatgagcgtgcccacgtggacttgcccgaagcgggcagtcctcgcagaataatgagctttgccatagccaagctcctttcgttgtgctgtggggcgagacaggtgccagcgatggcataaggttctgctcgccccaatattgcttgtattatgattcggctgccgaaaccgagccgcctggttcctgctgtgcggcggagtcaatgggcgccggcccgggggagtcgggcatatccagcggtgatacgtgcgttgaatcggtcgcgtgtgcatggaaccagtcggcaatctgtgtttcgcttaccggttgcagattccatgcgtccagtccaacgttgagggcttcgtggcgtgcgccctccggagacagctggtgcgtgtggccatacagcagacgatgtccgtcgaacggcaatgcctgatcgcggaaacgtacggcatcatccggccagccataggcaagatcctcacggtaggggaaatgcgatagattgacggtctccgtcgcctgcgggcggccaattccgagaccggtcagctccgccgtgctgttcggctcaatcgattcgaacagatctcgcgcgggtgcatcgtccagccaccagtcatcgtgattgccgataaccgcgtgcagatgcctgcagcgcagctgacgcaggcagctcttcagatgccggaccgatgttcggtatccgatatcgcccaaaatccacagctcgtcgtcctcgccgacaatccgattgatattggccacgattgcttcatcgtgcgcatcggtgtctgcggccttgcggaaattgagccgggaatcgtcaagcaccacgcccttcgcccaatcctcggcggccttgcgtccttgcgaggagaggagagcgtcatactgcgtgtgcccagggtcgaacgtggtgaatccgcgcagcacgctgaccagcggatgcccgaaatgcgtgtcagtagtgaaatacttcatgatctgttgttctttctgaatatgtgatggtatgcaatggggttttgttgcggtgcattgagttgcgacgatgccaagaacacatgctcgtacaggtgcgtatatgaggcatggcgcgaatgagtcggctcgatatcaccggcaatgattcagctatgcgccaatgagtggtgtactgatcagatttgtttggcagcgagcaggctgcgcttgtttccggttattggctggaactgagcagtacgcaaaccctgtttgaaggcgcattcgagcatcgccggcaggttcgtctgctggcgcttggcgtgttcgttcacgccgttgctgctgaatgcgatacgttgaatcatggtgtgcacaccataaggtcttacgtccaaatccgtcaaatcacggtgtgtgtaagcaagttacgttttggtcattcatgggggcttcttcgcgaatccgtcaaactacgcagtgtgcatgtatggtcatgtaccgcagctacgtaattatgagtacacttggcctataagtgcaacgaagcacttgccgtcgatgacggacatcatggcaggtgcgtgaaaaggggagcaacaaccatgggcaacatgttcgataatttgggcaaaggtcttaatgatttcaccaaacaagccggtaaaatagccggaaatatcggtgacacagcgggaaaaatcacgaaagatgttgccaaaggggcaggtaagatcgtcaacgatgcgggtaagcttgccggcgatgcgggcaaaatgacggcagctgttgcagggagcgtggcacagtctgcggccgtcgcaagtggcgaagtaagcaaagcggctgacagcatggcaaagggtaccgtctcaatcgctaaaaacgtcaaggatagtgccgataaggtcgatttgtttaattccaaactaagagctaaggctgtcgaggattacaacaatgccgtagaacgctatgaaaacgtagcggatgatttagctaaaagtacgcaagcgctgtatgacttgagaaaaatcgctattgtgcatgtcaagtatgttgaacaacatatcaatcaattggctaatacgccaaaagaatttgccgttgaactgcataagatcaataccgaagtaacgacgttcgagaataaagaggatgagattaaggaggcagaaaagcaagcaaaagcagctgaaggagggtctggagcaggggccaccctcagtgctttgggaatcgcagtagcaaccatgggacctacggctgcaatgggtgtggccaccaccttcggtgtagcttcgaccggtactgccatttctgcattatccggagctgcagcaaatagtgctgctctggcttggcttggtggcggtgcattggctgcaggtggcggtggcatgtcagccggaaccgcgttcctgggcctggctggtccggttggatggaccatcgctggcgtggcgggcgctgcggcaattggttctggtatttatgcgaatcataaaaacaaagaaactgctgacaagcttttgcttgagcgccagaatgtggaagtattaattcgcaaattcaatgcgaagaatgccgaagtcgcggcattgactgaggcaacgcaaactcagatagatggtgtacagcgtgcgaatgctgcggtgacaggcgccgattacagccagttctcccacgaagagaaaatgcaggcgggattactggtcaatatgacgctcaccttagcgcaaatgattaacaaggaactggaactcgatgactgacaagaatactgctgacaagcacgccatcgataacaatgttgctcagggcattgccgcgtatattgattatttgaatcagctacgtgtgtctactctgatggacacattgagacagattcttaataatgaaacaggtcagctgaaagatctcgccgagcgacaagctaatgcgctaaggaaccttgatttagcgaatcaaaatgtcatgaacattgtcaacagtgggcgtggtggtgaaaatggtatgcatggatttatcgctgaattcgcgcagacgggaatcgctaacgccagacgagcatttgaagggttggaaaaatcaacaattacgcttaatgataatggtcctgctgatttgttgattaacggcaagccagtgcaggtaaagttctatgcgaacctaatgaacgagctgaagacatctgcggaataccgttctatggatatgatgttttcaaaggaccacatggacgtttttcgtgcggtcatgcatggcgataaagaagtctttctcaacggacaaccgctaaccagtaaccaagtgcagaaaattaagcagcttatcgaagaggaaagtaacatccggggactgtcctgggacaaatggatgcaatcatcggtattgaaatatgatcaggtccaaagagaagcgattgaccggacttttactgaagaaaccgacaatattaaacggcagacatccgagcaaaagagcgaaatctccaataaggccaatacggataaggctgctgcatatcacaaagctcagccgaatctaggcgaggctaacaaagctgccggggtgggtgctgctatccaaggtggattgaacttcggcattttcgtgtatcaaaagcacgaagaaggcaaggaaatatggcagtttaccgctgaggattggaaggaaggaggcgtcaagacagcagagggtgccttcaaaggcgggttttcgggctatgcaatttatggattgaccaatgtctgtcatctttcggctccgagcgcaggggcgatagcgtccggaacttttggactcatagatgctgtcatgaaattccgttccggagagattgatgatgacggtttcttgagcttggtaactatcaatgcccttgatgctaccggcgcggcggtaggagcggcgattggtcagacgcttattcctgttcccgttgtgggcgcgcttatcgggtcaattgtcgcttcgaatgtgcttggtcttggcaagaacatattgagtgcaagagagcgggcaatcatcgctgaatatcagcgcaaagcggacttgttcgtcgcgaatctcgacgtgcaatacgcgcaaatattggaaactcttctcgataaataccggaaactaggggagctgcagacttatgcattcaatcttgatttaaatatacagctacgtttcgccgcatctgttgatttggcaagattcattggtgtctctgaaaccgagatattgcacaatgaagcagagattgacgacttcttcctgtaaggggagatgttgccgtaattgctgtaccaacgactagacgttggtacagcaacaatctttggttttgtaggtatgtgatttcgagtaattcacaaactgtagatctgtgcgccgaacggccagagcgcgagcttggccattttgaacgactggatgccgaacggaatgccgatgatggtgatgcagttgagcacgcctgcacccagatagccgagcgccatccagcagccgaccagcaccacccacaggatgttggccaaggcagagccgactccgccgccgtattgcacggttttgccaaacggcgtcaaggtgagtcccgccatcttgaacgcttgaatgccgaacgggatgccgatgatggagatgcacagaatcagtcccaccaatgcccatccgattgcgatggccaatccaccaagaatgatccacaggatattgccgagaactcgcatgattagtccctttccgattccggtcgattccgcgcatgttcagcttcactattttgccagaaatcatgacggaaacacgagacgcaacccttagctcgcccctgattcatacccggaccgttattcaggcggagcgtatgcggtaagcccaatcctcttgtgaagattttgtgtattgtcaggcatgcgtgggtttcaccgtcgatctgaatgatgataggcttctcgatgcctgccgtacgaagactcatcaaggagatgccatgaacctgtatcgctacgcgatgttcatcgcacgcgcctgccgtgggtcgttcgtcggcaatgttctgtttgccaatccacaaatggccctattctcgatgctggtgtagcggggggcacgccttatgccgggatgtactgatggcccatccgcaatcgacgtcgcatgaatcgctcaccatagccatcaacttacgcaaagccgcgaatcgtttgccgtatatgaatgcggaacggatggcggcttttcctttacgcccggactcatcggtgtcctcgcgtcttgacacaagcatggggccggatcgcccacacatgccgttaccaacagaaggaaatgctgtgacctcacagaaaaacgcggaactcgggtccgccgccagttccgtaaagcctattgatccgcacacccgattcaccgtcgtgggtgtgatcgtcgtcggctcgttcatcgcgctgctcaaccagaccgtcatgtcaccggccttgccggcactgatgcgtgatttcaatatcaccaccggcaccgtgcagtgggtgaccagcgtctacatgctggtctcgggcatcatggtgccgatttcaggctatctgattgataaattctccacccgaaagctcttcgccggagctcttgccgctttcatggtcggcacactgctgtgtgccgtcgcgccgaatttcatgctgttgctcgtcgggcgcatcctgcaatccgccggctccggcgtgctgttgccattggtcgctgtagtgccgatgctcgtctatccgccggataagcgcggcaccgccatgggactggccggtatcgtcatggccgccggcccggctatcggcccggttgtcggtggtctggtgattgacagtttcggatggcgaccgatgttcattggcatcgcagtcgtggcactggtcatccttgtcggaggcacgatgatgctcaagaacgtcagcgagttgaagaacccaaagctcaacatcctgtccgtgatcctttcgaccatcgcgttcggtggcctgctctatggcttttcgtccgcttccacgatgggatggagcaatccggtcgtcattatctcaatcgtcgttggtcttgtggccttcgtcgcattcgtatacaagcaagtcaagctcgatgagccattgttgcgcgttgatacccttgccacccgcaatttccgcaactccgtgattctggtcactctgatcaacgccgcagtcgccgcaaccaacgtgacgttgcctatcttcatccagaatgtgctcggccaatccgccaccgtcaccggcatggtcatgctgcccgccgcggcggtcggcatcatcctgagtccggtcgccggcgccgcattcgacaaattcggtccgcgcggcgtgggcatcggcggccttgcgctcatgaccatctctcttggtcttctcggcaccatcaacaccaggacatcagtgctgtttgtcgccgtgttctgcgcattgcaggcatccggtcaggctatcgccaacatgccgatcaacacttggggcgtcaacgctttgccgaacgacatgatcgcccatggaaacgccatcgccaacaccggccgccagatcgcggcagccattgcgacctcgcttctggtcaccgcagaaacatccatgaccgcctcgcacatgtcccagggtgtgaagtccgccacggccagcggcatcgcgttctcctacctgctgtgcgccgccatctcgctggtcgccctgattatctgcatcttcaccgtcaccagccgtgccaaggagaaggacgcacgcaacgccaaggcctccgaggcgcaagcctccgccgaagtcgcggccgaaaccactgaaggccagcccgccgagcatcactacgccggcgcatacgtggcccccgccgcctccctgttcaagcaggcccaggaacagtccatcggcggaatcatggacgatcagccctacagctgcctggacagcgatgacatcacgcatgtggtgcgcgagttcatccgcctcaacgtctccagccttcccgtggtgaacggcgatggcaggctcgtcggcttcgtcagcgacggcgatgtcatgaaatcgattgccacctatgaatcccgtacggtttccaccggcaccggttcgacgatggtggtgttcgacgacgaaaccgtggcctccaaggtgcaggcgctctccggcaagaaggtgatggacatcgccacgcgcaaggtcgttgccgccacgcccgaccagcatgttggagaggtggcccgaatcctcgccaagaagcagttcaagaaactgccggtggtggatggtgatggcagactcgtcggtgtgatccgccgtaagtccgtgatggaacatgccttcgatgcgctgttcccaaaggatgatcggtgattaggcgccatcatcgctgaatagaatgaatggaatatgaggcttcccttctcgcgggggaagcctcattgctttgtccgcggagtcttacggcacctgcgcaagggcaacgtcacgtcttcatgatatactatcgaatagtgtgttcctatcgttgcatggtgacgctaacgcatggcgtcacgatactgaagcctgccatctaacggcgggtacggctcgttgctggagtcgtgcacgcatacgcgcgtcggcgtgcgtatgccgtgatgtgacctttgtagtggaattgaagaattgagaacactcgtatgtcttctagtagtacaacaactgaaccaactgtgcgcgaaacacccgaggtttccggcgatgacaatgcgaatgcgcgcgcagcggtccatagcgcgaacaaacccggtgccgcctatgccgcagcagtggccaacggggaatccgagcgtgcgtggatccgccgtgtagtgcttctactcaccggccaggcgttctcgctgctgggctccaatattgtgcaatatgccatctggtggtggatcgtattgcagactaaaaccggttcggccatgctgctggccacgttgtttggcgtggtgccgcaggccatcgtctcgattttcggcggctcctgggccgaccgtcacagtcgcaagttgctgattatgctgccggatatggtgattgctgtggtcaccgtcgtgctgtcgctgagcttcgcgatgggatgggtgagtctgaccatgattttcgtggtgctgttcattcgttcggcgggcggcggtgtgcagacgcccgctgtgcagtcgttcataccggatgttgttccctcgggcaaactattgcgcgtcaactcaatatacggcgtgattaattcggcgaatatgattgtggcacctgcggtggctgctgtgcttatcaacacagtgccgctgtggtcgattctgttagtcgatgtgaccacggccattatcggcgtcggctttgtggcgttgatcaaagcgccgaagaagagcgcggaacatgttgcgaggcgtatggctgaagcggagaatagcgggcaacctgcactcgaaccgatgtcggatgccaatgctgatcgttcgctggttgccggcgtccgtcgtgtgtttgctgacttgaaagatggcttcagctacacatggcgccgggcgaacctgcgcaacgtggtgctcggtgacaccttggtgtgcttcgtggccgtggcgccgatgaaccttacgctgttgctcatgacccgcgaatatgagggcatcgatttgaatctcggattcatcaacctgaccaccgcctccgataaactcgccgccaacgagctgggatggagcatcggtatgctgctcggcggcgcgctgatgtctaccatcggtgccaagctcatccgcaacaacatgcgcgtggtcgccttcggcatcactctggtgggcgtctccgtcgttggtcttggcgtggttcacaatctgctggcgtatttgctgattgatgtggtgaacggtttggcttcggccatctgcatgggcccgatgcgcaccatcatccagaccgaggccgatgagaagatggtgggccgtgtattcggccttgacaccaccatgagcacactcagcatgccgctgggtatgttgatcttcgcgccgttggccgatgtgattccaatctcgctggtgttcatcatcggcggtgtgctgactctgcccatcggcatctatctgttcggccaggcgcgccgcaacgccagtgcgcaggtgacgcgaacagcggcctgacaggcacctgacagccaccttgcaggcgcaaagtcaactaccagatttgcgcatacagatcgtaagacgaatacttcggcagatcgtagacggtaatcgagaatggcgtggattgaccattgcccggccaatccacgaatgcgatatctccatagatgattgcgttctgtgcgttgcgcagtactagggaaatcttgatttgctgcccatcagatggcttgaatccgtctgttgcggcgcggacctcgccattgaacgtcgtgccgccgtccctgttgtctattttggatgttccgctgatggggaaggtggcggttccttgagcctcggtgacgttgtacgtatcagggctaagcacaacgaaatctacggtggccggggccgtgccctcgcctgcttggtcggcgtcatatacagtctgattcgggaatgccatattcagcgtttgcgtctgcgagaacacgatggaaccgtctttggcccgccccgtaatggtaatctgcggatactgcacctgctgggtcgtactggtgttgcgcagggcgaaagcgtagtggacatacccttgctggtccgccgaccagccggattccactattttcagaggattatcggtgacggtgtcttggccgtttccatcagcgccgtcagtgccgcctactccgcccgtgccattggcattgtcggttcctgacccgttcgaggagtgcccgccatcggccttatcggttgattggctgctggattgtgtcgaggaatcgggcgatgttgccgacccgataatgccaagttggcctgccaacacaatgcctcccgcaatagcggcgaccaccagcgccgctccgacgatgggccacagcacgatggcgcgtttgctcaagtgcagacgccgaaatagccgagacgccgacgtgacgccgttcgttgtgctcggtgatggcggatttgccgatgatgcgttcggcatgggcggattggactgggagaacagcgcctggcgaaactcctggacgctctgtggccgtttgctgggctcgaatgcgcacgcatagccgatggcggcgcgcagtcgtgccggtactgcggcatcatcggcaagtcgctgctcgtagtcgctggcatcgggataggcgccggtcagcatgaatccgagcagtcgaccaagcgagaacacgtcggaacgcgcgtcggttttggcgaagccatattgctcgggcgaggcgaaaccataagtgccaagcgccgtggtgtcccgcgagcgattgcttgacgctgaccatatgcgcgcaatgccgaaatcgatgagatgcgcgccatcccgagccaggatgatattggccggcgtgatgtcgcggtggataacgctgtgctggtgaagctcctgcacggcttcgcaaatttggtcgataagctgcacggccacattcggcgcaagccgcccgttttcctccacaatttgcgcaagcgtgctgcccggcacgtaatcgtagacgatgacgaaccggtcgggcagctcgtatgtcgcttccacgcgcggcagacgattactctggcaggcgctgagcaccgcccacacggcagattctagtggtggttgcaacacctgaggtttgagcggccttccatggtcacgttgtcggttgttgaggttatcacgcggcgtcgagcagttcgatgatcttctcgcttggtttcatgaacccgagggttttgcgtggccggtcgttgagttcctcggcgaccgcgtcgaggtagtcctccgggtagacggataggtcggtgcctttggggaagtactggcgcaggagcccgttggtgttctcgttggtgccgcgctgccacggggagtgcgggtcgcagaagtagacggccatgtccagcgaggcgccgatccgtttgtgcagggcgagttccgctccctggtcccaggtcaggctgttgcgcaggagtttgggcaggtgctgcatcttgtcgatgatggcctgctggacgtgttcggcgtcgtgcccgtcgggcaggtgcagcaggatcgtgaacctggtggtgcgctcgacgagcgtgccgatggcgcttttgttgcggctgccggtgatgagatcgccctcccagtggcccgggaccgcccggtcctcgatctccgggggtcgctccgagatcatggccatgggttcgcggaaacggggtttgcggccttggccgccttggggtctgcgggcggttcgcccctgcctcatggcgcgtttcagctcctgcttgagttcgcccctggcctgcaggtagatggcctggtagatcgtctcgacgctcgcgtgcatatccccattatccgggaagtccagcctcagccggttggctatctgctccgggctccaatgcctgcgcaacccggcggcgatctcgtcccacagtcgcgtgccctcggccgccttgcgcggtttggggcgtttgagccggtccgcggccttctgctgggcgcggtaaggctcgtaaccgccggactcgggattcctgttgcgctcgacctcgcggctgaccgtgccggggtcgcggcccagcaggcgggcgatggcgcggatcgaatcgcccagacgcagacggtccgcgatctggatgcgctcctcctggctcaggtatcgcggatggagggtcttgggtttgtccatggtggaacgataccagtccaccaggggtttctcgttccttcccgtggcgcgcgtcctgccgttgcgccacgccttgccggtgcgtttcgagacgccgaccgcgtgcgcggcctgggtgaagttcatgccttcctcgtccagcaggcgcacgtactcggcgcgtctcgcctcgcacatcagcttcctcgtcggatattcgacgccgttgaacgtccaacggtgttccccgccacggtcttcgtttcggtggcttctggtcacctgaccctccttgcggtaggtcaggtgttgcaacgatcactagaacccgcccacattgcgttgcgctaggggagggggaatcttcttgcgtacgaacgggccgttgccgtcaatgctcaccagttcagtgacgccggaaggtccgcgagcaagcgtgcgctcaacatggtacgcatcgtcgatgctcatcgcatgcatcgcttgcttatcgtccatgtctctccttgatgccctcttacttgcgtctcactggtgagtgttgttgggccgaatgtcgtcaatcggccggcagcaacgtcgcctctcccatacgatacaactcgtcgtccgtggcaatgcgatcgaatccattgcgtatacaccagatgataatcgcgtcacgtcgctgtttgcaccacagttcggaaacgcctgcaagacgaagcagccgttgggtttcgcgtaatgtgcacttgagaccaaaagccagcatgatggcgtgatctcggccggggcggcttttgccggagaaaatgtcataaaccactgtggcgttgaggccggatgcccgcaccacgtcggctcgtttcaggccatgggcttccatacggtcgaacagatagtcggtcagcgtgcgtgcgctgacaagtccctcatcgagatactgctcaatgctggcgctggcgagcagccgatccaacagttcctcggtcaaatgttcttcggggatgtctgccattgcccatgctccttgtcgctgtgttgcgggtgctgtgctgcgccatcgtacgcggttgctcgattcccagcgtacaggacgccgacttttcggaaacacgccgaaaaattcagttgtcagctgatgcatggcccgcgcgtgtcgtcgacaatggtcgatgccatccgtgtaggtgcggtggcggaaaggatgttcatgcgcggtatcaagcatcgacaataaagctaacatgaatacaaaatgctaatttgcgtacataataacaacgccatacactggtttcgatgtatcgcagagcaacgcgagcaataagaagggacgcaatgatgagcgaacgataccggcttgccatggcagtcggattgaccgtaacggttgccgggattgcctcttctgtgctggtaatgctgctgcttaaggaaagaagggcatcatgacaacgccatttgatcaacaacctcagccggttccaccgtccgaaggcacgaatgacgcaccggaagatcgcgcgaatgcgcctaccgtgccgaatgctgtaccggctggccagccaaacgtagcgtctgatggggccaccactactccgatgactccggctacggcaccgcagcagcccgccggcgcgccattcgatcgtgtatatgcggtcagtccgcaacagctgttccaagttattcacgaccagctgactactggcgccacgtttaccttggataacgaaaacacccagaccggagcgttttccttccactcctacgatggagtgaactgcacgctaaccgtagtcccgcagggtgcggctgggaccgccattcgtctggaggcgactggaaacgaaagcgccaagcgcgttgatgagttcctcgccgctctggacaagcgtattggtgtggctcctgcacccgccacacacggtgccggtgctgccactggttttgctggtgccgctgcgcctgccgtgcttgctccgaatgcacaaggggtgaagaagacttccaagctggctgtgttcgccattatctggggagtgttgttcgtactcgcccaatttgtggatgtttctggccgatcctggggcggactgctgttcgccacggtgattccggcactgctctcaggcttcgccgtatacgtgacccgcccgagtggcaaggtgcaaggccgagtgctggcctgggtggcagtcggtatcaccgttgtgggtctggtaatcggtggcgtgtttgtaattcgtgacggtgcgaaggccaaggctgatcgggcggaattggaagcatcgctcgccaccaagtgcgaagcatattcatggccggagtcggatatcgcggcgctgctgccgcagccgaaatccacaaagggtgaaattaaaagcgagtcttcggactatttctccatcgaggtgtgcggtaccgacgccaagcagtatgccgactacgtcaagtccgtgcaagacaacggtttcaccgtggactataacaagtccgctgacagtttcaatgccaagaacgccgatggatacagtgtgagcgtttctcgtgacactgacgacgaaaccatcatgtccatcactatccaggttccggagaagaaggaagatacgtctacggacgacgacgccgcgaagcaggatgataagagcactgatacgggcgctgattccagcgatgccaacaagcagagcgaccagtcttcggatcagaaggcgcagcagaacaccaatgacagtgctgacttcaagtccacgatggacagctacgaggcctttatcgatgagtatgttgccttcatgaacaaatatcagaaatccgataacgtggtcagcatggctaccgactatgccagcatgatgaagcgttactctgagttctcccagaaggtagacgccattgacgaaaactccctcagcagtgaggatttggcctactacaccgaggtcatgactcgatgcacgcagaagctcgcatcggtgggccagtgatcagactggcgtatcgaggtaacggttttccaagaaagggacgatgacggtatatgggtatacgcggcagacagtatacgccaatggatgagccggccttcaacaaggccatccccggaacggaggctctggccgggacactgaaagacacttttagcgcattccgtagtgggcttgggattaccgaacccgtggtttcggtgaattgcgaaggttgtggcgctccgctttccggtcatcgcaaagaagtcgttcgatgcgaatactgcgatcgcgaaacgcagctatagccaacatgccagcataacggccggtcttgcgattgcatagtcgcaagaccggccatatgcatgagatatcgaggaaaaacagatggcagttattaaggcgttcgccggcgcgctcggcggtacattcgcggacctgtggcgtgatatcatcaccgctggtccgttcacggaacacaccgtcgttgtgccgggcattccccgcggaagcaacaacgatcgcggttcgaatgaatacggttccgagggaataatcaccaatggttcgcgtatctatgtgccagagaatactgcggcgttcattttctctgaaacaggtatcgaaaacgtcatcaccgagtcgggcggttatgaatatcgcaacggggaacagagcgtgctcgccggagacggcatcggatcgttcttcaaccaggtcgccgatcgattcaccttcggaggtcagcctggccgcaccaaatatgtggccttcgtcaacctgcgtgagattcgtggcatcaaattcggcacttctgcgccgctggtgtataacgaccggttctatggcgtcgatttggaaattcgcgcacgcggatccatgtcgctaaaggtcactgatccagttcgattcgttcgtaactttgtgcctgccactaccgtgtcgtattcattcgatgatgaagggccacgtaggcagattctgtccgaattcgtacagtcgtttattgtggccatcaattcgttgtccaatgaatatcgtatttcgcaattgcccggcaaggcgaatgacatcgcagcatgcgtgcgtggcgatcgagccaatgccggtacatggaatgatcgttttggctttgaagtgtccagcgtgggcatcgaaagcatcgagttcaccgagcaatcacgtcaactcgtgcagcagttcgcctcgaataagatgaatgttgccgcatacgagggcgtttcccaacaagctggcaatatggctgcccagcagcgcattgcgcaaggtattcaagacaacggctttggcgatggtggcatgttgcttggtatgaatatggcgcaagccatcagtcctatgaccgccgccccggttcaagcgccggcacctgcgccggcaccggaagccgctgttcccgcctctcacacggcatccatgtctgtggaagaacaagtcgaggcgatgaagaaattgaaggaattggttgatatcggcattctctcccaagaagaatttgatgcaaaaaagcacgaaattctcggcctgtaaacggttcattcatgcaactcgaaacagctgataatgagggaaacgctggtgcgacacggacaaaatggtgctcagggcttcgaactgggttgttcaatccgtttcgatatttcggcgactcagcgcttgttcgggccgccgtccgggaacatcaagtaagtgatgatgccggcggcggttccactggccagtgctccggtgatgacggcaagagcctgcatcgccgtgctgagcgtaggcttgcccgttgcggcagtctttgaagccttcaatgttgcggcactgggcttgcgtttctcggtggcggcgttgtcggcaacgttgccaccgtccgtattgactggggcattgtcggcaacggcctcgccgtcctgctcttgggcgcgccgttcgcgaatgcgttgctcaatgggatcgtcgaccaaagtcttgatgatgcgtgccagatcgcggtcttcacgacgcgcgatttcggcgctgaacaccgtacgtaaagcgagatactgcagtttggtcatcgggcttttgccggtctccaagttagacaccgtctgtcgcgcgactcccagctcgtcggccagttgctgagtcgtccatccggctaccttgcgaatcggacccaggttctcctgaaacttatcaatccaccattgttcgatttcagacgccgccattacgcacctccttccaggctgtcaccagtgtacgttacctgtaccgaaatcaatccaaaaaacagtgttcatgtgaaattcactgcgtatttgagctttcgccggcttaccgagattagccttaaacaaggaataacagagtagaagcagaaggtatgcgcgtattcgatttcgacggaaccatctatgatggcgaaagcctgttcgacttgtacctgtattccgcccgacacgacccgaaagtgttccgctatattgcccccgtgctgcggtacgcagtcaaatacaagcttggccgggccacgcttgaacaaatggaatacggcgtgggtaagatgaccgaaggctatctcacggaactgagccgatccaaacgggtggcgagcgtcgaacagctcgtggacgacttctgggataggaactattcacgcatcaagccctggtaccagcctgagtcggacgacgtgatcctcaccgcatccttcagtctgacggtgggggaggcctgccgcagactcggcgtgaggaatctcgtggccagcgaggtggatgtggagacgatgaaggtcacgtacctcaacttcagcaccaacaaggccaaacggttccgcgaactgtacggtccggacgccgtcatcgacgagttctacaccgactccaaattcgatcagccgatgatcgacatggcccggcacgcgttcatggtcaaggggaacaccatcacgcaaatcaagtaggaaacaacagaaaacaacacaacgtaaccaataacgaaaggggaacatatatgagcatgccgctcgatctatacgtaatccggcatggcgaatccgaagcgaacgtcatcgtccaggcgggcgagcagggcgacaattccctgtacacgcaggacaacgtcaccgtacccgaccgctcctggagactcaccgccaccgggcgcaagcaggccgactgcatcggtcgctggctggtcagccagcagcagctgttcgaccgctacatggtctcgccatacgtgcgcacccgcgaaaccgcagccaccatggctctgcccaaggccaaatgggaggagaaccgtgtgctgcgcgaacgttcttggggagagatcaacaccatcaccaaggacgaattcaaaaacaactacgcacgcaactggaacttcaagaacactgatccgctgtactggcgtccgccggcaggcgagtcgattgccgatgtggccgaggaccgtgtgcacaacatcctgacctcgctgagccgcaaatccgattcggaatccgtggtcatggtcacccacggcgacttcatgctcgccctgatgctcaccatcgaggatctggccgacgaggaattcctgcatcgcgccgactcggacgactggaagatcaccaactgcacgtgcctgcattacacgcgccgcgacccggaaaccggccgcacctccaagcgtgtgcgctgggagcagaccgcccggcccgtgctcgacgagacgaccggccgctgggaggtcaaggtggagccgtggcgcgaattcaagcgcccgtatctctccaatggcgatttggtggatgtggtgcaggccgtcgatccacacctgctggagtattacggcaaatagcctttcccggaagagagacttcacaaaatcttcgtgagctagaatggtgcgtggtgcggctggttgtgaatgccgtgccccaagcgagagcgaggagagtagtaatgtccaatatcttccaatggcaattgcatggcgacggcaagacgctggcgcccggcgaggtagtcgagcccgatgaacgtctgacttgggtgcgcaccgccggtatcggcgcacagcacgtcatcgccatgttcggtgccaccttcctggtgccgattctgacgggcttcgacccgtccaccaccctgttcttcacggctatgtccaccgcactgtttctgctgatcaacaggaacgtgctgccgagctatttgggctcgtccttcggcttcattgcaccgatcaccgcggtcaccaccgccaacaagggcattgcggtcgccagcttcggcatcatggtcaccggtattctgctggccctggttggcgtgctcgtgcattacgccggctccaaatggatcgacatcatcatgccgcccgtggtcaacggcgcgatcgtggccatcatcggcttcaatctggcaccttccgtgtggaccaacttccaagccgcgcccgacaccgcactggttaccctgttggccgtgctgctcgtggctgtgctgttcaagggcttgctgggtcgcctcaatattttggtcggcgtgatcatcggctatgtatatgcctgcatccgtggtcaggtcgacttctccgccatcggcgacgccgcatggatcggcttcccgaagttccacctgccgcaggccgatttctccatccttcccatgttcatccctgttgtgcttgtgcttgtggctgagaacgttggccatgtcaagtccgtggcccaaatgaccggccgcgactacgacaatcagatcggcaccgccctcatggccgacggcctgggcaccacgctcgccggcttcggcggcggctccggcaccaccacctacggcgagaacatcggtgtgatggccgccaccaaggtgtactccaccgccgcctactggtgcgccgccgcctttgccctgatcctgagcctgtgcccgaagttcggtgccgtgatcaacacgatccccgccggcgtgctcggtggcgtgaccacgctgctgtatggcatgatcggcatgatcggtatccgcatctgggtggagaacaaggtcaacttcgacaagccgctgaatatcatggtggcagccatcaccatgatcattgccatcggccaattcgcgttcactgctggtggcatttccttcaacggcattgccattggcacgatcgtgattcttgtggcctaccacggcctgaaggccattggcaaggcaaccggcactattgccaaagacgatccggatattttgtagtgtgttttagggctactgggctgtatcttggctcagcccttttgcacaatggcccctaccttcacgggtgggggccatttgcgtgttccatggagcggtgctcgccttacgtggtggtaaaacccatggggcggcaaatatcccatggggtggtaaaaccctcatggggcggtaggtgaaaatggctttattctgcggtttcacaatttcttcaaaccgccccatgggcaagttgccgccccatgggcgagttaccgccccatggggtcataagtaaagagtgggatgacagtgtggcgagcaccaagcaaagtagggggcttacgctaagctcggaaagcttgcgtaatttgcgtaacctttgacatgaaaggccactgtgccccgtaataatttcgatgatcgtgacgattccgctgatttccagatgaacgacagcgcggaatcccgcccccttacctttggcgaacttggcgtacccggaccgctggtgcgcgtgcttgcggcagatgacaagaagaccgcattccccattcaggccgacaccctgcccgattcactggccggccgcgacattctcggccgaggtcgcaccggctccggcaaaaccctcgcattctccattccgctggtcacccgcctcggttcctacgattcgttcggcgaaatcgcgatggaggagttccgcaaggaaatcaagcgccgcaagaaggccagcctggaagagcgccgcgccgacgacttcctaccgcacccgcgcggcctggtgctggcccccacccgcgagctcgcgaaccagatcaacgacgtgctgatgccgctggcccacacgttcggcatgaacaccaccacggtgtacggcggcgtcaagtacatccaccagatccgcgatctgaaggccggcgccgatatcgtggtcgcctgcccgggccgccttgaggacctgctgcgccagcaggcgctcacgctctcgtccgtcgaagtcgtggtcatcgatgaggccgacgaaatggccgatatgggcttcctgccgccggtcaagcgactgcttgagcagatttcgcccgacgcccagcacatgctgttctccgccacgctcgatcacggcgtggatgaagtggtgaacaccttcctgcacgatcccaaggtgcacgaggtcgattcggccaccaccgaacccgacctgatgacccaccacgtgttcgaaaccacgcgcggcgacaagcacgaactcgtgcgcatgctcgcctcgggcgaaggccgccgcatcctgttcacccgcaccaagttccaggccaagaagctcgccaagaacctgacgcagaacggcattccggccgccgagctgcacggcaacctgaaccagaaccagcgcgatcgcaacctcgctgcgttcgattccggcgatgtgcgtgtcatggtggccaccgacgtggccgcccgtggcatagacgtcggcggtgtggagctcgtggtgcaggtcgagccgccggccgacccgaagtcctttgtgcaccgctccggtcgtaccgcccgcgccggcaaggcgggcgacgtggtcaccctcgtgctgcccgagcagcgccgcgagacgcgccgcttgctgaaccaggccggcatcaagaccaagatgatcgaagtgacccacgattcgcccgaagtgcttgagcttgtgggcgaccgcgccgagcgcgtagatggttggagcctcgacaagtcgcagcccgtgggcaacccgcgcaagggcaagaacaggggcgccaagaacgcggcgggcgacgagtccggccgcggcggcaagcgcaagcacaatcgcaatcgcaaccgtgacgagcagaacgttgccgagaccgagttccagcacgagaacgcaggcggcgagtttgttgccgaaggcgagccgcagcgcaagcacggcgacaaggccagcaagaaggccgtgaagaagaaccgcaaccgtgcggaacgccgtgcaggcatgagcaaccccgaggccgagcgccgcgactatctgttcgagcatggcgatgaccgccgcgaggagcgccgcaagggcgaccgtcgcgacggatacggcaagaaccggtacgacgagcgtcaggacaatggccgcgaccagcacggcaagaaccgtcgcaatgatcggtacggcaagggcgacaagttcgataagcgcgacagggccggatacggtcgcaacgatgatttcggcagccgcaggcacaatgcgggccgtgatttcgaacggtccgattcccgcgatttcgagcgtccgcgcaagcctcgccgcaatgaacgcagccacgaggattacggcttctcctatgacgagcgctcccatgacggccgcagacagtccatgcgcaacacccgtcagggcgaaggcggcaagcgcatccatcgcaagaacgagaaccgcatcgtacgcgacgagcgttcagaaggtgccaagcgtcacgaacgccgcatgatcgccaaatacggcaacacggaaggcccgaaccgccgtcattccaagaagaatcgccacaatgcgccattccgtatgaagtctggacgccgttagtccgacagcgcgtatgaatcaggcccgacgacctttgatggtcgtcgggcctgattgtgttataggccggtgtttgcgatgcggatgcctgttcgcctgcctagcggccatgacgattgcacttatcgccgcagtcgttgtgatcgtggccatgccgaaacggcggtaatggcctgtacgcaccctagaataacggatatgacgcaatcgcagccccgatccaaacgcacgcccacccttgaaatccacgggagaatccttgacgcggcaaggcggatcgtggaacgggacggtgtggatggtctgaccatccgtgcgctgtccgcacaggccgatgtgtcgcccaccagcatctaccagcacatcggcggcaagcaggcggtgtgcgatgcgctcatcgacacatacttcaccgatctgcgcgaacagctcatcgccattgacgaatccgaccccgtgctgcgcctgcgcagggcgggcataatctaccgtgaacacgcgctggacgcccccggcatttacgcgctggtctggatggggcaggcgtcggactcggcccagcactgcctggacgccatcacgcagatcattcgatacggccaggcagcatctgtattccgcggcgatgacccccatctaatcgcatcctccatctgggtgtccatacacgggttcatccaattcgaactgcgttccgcacaaccccgcacacgcggccgcgaacgggtcgaccggtcgtacggttacctgctcgacctgctgatccgaggcattcagaggtgaatgagttagctccctctgatgagggagctcaccattgatacgctgtactgccatcggcgttgcggatggtgaaagtgggggattgctcgatgttgaggtccacggtcagggaatgctgggcgtcggcgctcgtcgaacgatagacgaagtgcttgttttccagcttcacggcctcggtacgcgcatccagcagccatgggttgcgacggcgcagcgcgatcagcgcctgatgcagccggtatgtcggctctcccagcgtggacagttcggcaggggagccggggaacttcggacgtacgtcgtcatcgccgccgaaacgctcctgcttgacgcccacatagccctgttcgtcgccgtaatagatgcttggcacgccgccgaccgtcatgagcaccgccaatgccaacgccgccttggccgggccaatctgcgatgcgatacgcgtcacgtcatggttgccgatgaacgtctgcggcacgaaggaatccaggaacgcgttgtgccgcttcaagttccaatccagctcgaagaagttctccgtctccagcgcatgctggatcgacttccatagctcgtattgcgtgatcgaatccatcgtggattcctcgatgatgcgcgggtaatcgccatggatcacctcgccgaaaatccacgaatacgggtgtgcggctttgacctgcggcaacacgcgcgcccagaacgggctcggcacggcatacgcggcgtcgaggcgccagccggcggctccgcgatccagccaatggctcatcacatggaccacatagtcaacggtctcgtcagccgaatggtccagcgccaccagatccccgtgcccctcgaacacatccaaagcgggttcgccattatcaccgacatgcgcgcggaccagaccatgccacgggttgtcggccggattcaagcgtccggcggtctcgtcaagcgccgcctgaacggccggatgattgcggctcacgtgattgaacacgccatccagcatcacctgcaatcccatgtcccggcaggccgcgacaagctgatcgaacgcggcatccccgcccaatcgcacatcgatatgcatatggtcgagcgtgtcgtatccatgcgtcgccgactcgaacaccggacccagcagcaggccggacgcgcctagatcgcgcacgtactccagccagggaattatcgcgtcaaggccgcggccatggaactggcgcgggccggcgggcctgatatcggcaccgcagaagcccagcggatacacgtgccagaacaccccgtacttcacccaatcgggcattgtgcggctcgaatccatgcttacaaccactgtgcacctcctgattgacaccgtgtccattttcgcacatcgcggtgcgaatcccgggtaatcggcatgaaacgcagtccgtgaacatgtggccaagctcacatattgggacattttcctgaggcgcgacatgccgtggctacgcttccaaccagtgccataagcagacgagagataccccaaaagggtcgcaatgaagagaacctttcccgcaaaggttattgaagaggaacagagggttattatgaccaccgccgcagcccaggccccggcacctggcaagttggaattcaaggacgattacacgccggacgaagccgaacgtgtgattcgcaattcgaagggactgcccgtaggcgttcgtcccaaaatggtatggacatggaagaaggccctgctgtgggccgccatcgccatcgtatgtgcctgcggatgggcgattctggccgtctcgcgcggtgagcagatctccgccatctggttcctggtcgtggcgctgagctcctacgccatcgcctaccgcttctatgcctattacatccagatcaagatcatgcgcaccgacgacgcgaacgccaccccggccgagcgcgtgcatgacggcgcgaacttcgaacgcaccgaccgccgcgtgctcttcggccagcactttgccggcatctccggcgccggaccgctcgtcggcccgatcctggccgcgcagatgggctacctgccctccactctgtggatcatcctcggcgtgattttcgccggcgccgtgcaggacatgctggtgctgtggatctccgccaagcgccgcggtcgctctctgggccagatggccactgatgaaatgggtaagttcggcggtatgatcctatccatcttcctcgtggtgatgaccgccatcgccatggcattcctggcgctcgtggccatcaaggccatggccgcctcgccgtgggccgtgttctccatcggtatgaccatcccgatcgccctgatcatgggctgctaccagcgtttcctgcgccccggccgtgtcattgagaccacgctgctcggtttcgtgctgctcgtgctcgacatcgtcgccggcggatggatcgcctctatcccggccgtggccgccgtgttcacactggacgccaagcagctcgtcatcgccctggtgatctactcgttcgccgccgccgcgctgccgcactggctgctcgtcaccccgcgcgactacctgtccacgctgatgaagatcggcacgctcgtgctgctcgtcatcggcatcatcatcgccaacccgtccgtcaaggtgccgggtctgaccgaactggcctccacctccaccggcccgaccttctccggcaacctattcccgttcctgttcatcaccatcgcctgcggcgccctctccggcttccacggcgcggtgagctccggcctgaccccgaaggccgtggagaaggagaaccagattcgcatgatcggctacggttcgatgctcgtcgaatcgttcaccgccgtcatcgcgctgatcgccgcgatcaccatctcgcagggcgtgtacttctccaccaacatgtccgccgcacagatcaccgccgcatccggcgtgagcatctccgccacctccacgccgggcgaacaggccgatgccgccgtcaaggccgtggagtcgatgaaggtctccgacatcgaaggcaaccagatgcaggtcacctgggattccgtggacgagaacggcgcggccaagacctacgaaggcgccgcggcgcttgagcaggccgccgccgacatcggcgagacctccatcgtctcccgcaccggtggcgccaccacgttcgccatgggcatggccaacttcctcaagtcctacctgggcggccacgactcgatggccttctggtaccacttcgccatcatgttcgaagccctgttcatcctgaccaccgtggacaacggcacccgcgtggcccgctaccagatcggcgaaatgctcggcaacgtgcgcaagctcaagaagttcgccgacccgacctggaagcccggcaacatcatcaccacgctgatcgccaccgcgctgtggggcggactgctgtggatgggcgtgtccgacgcgaacggcggcatcaacgcgatggtgcctatcttcggcatctccaaccagctgctcgccgccgcctgcttcgtgctgatcaccgtgtgtgtggccaagatgggctactggaagcacctgtggataccggtggtaccgctcgtgtgggacatcgccgtgaccttcaccgccgacttccagaagatcttcgggccgctgagctacttcaccaccgcctccaagtatcaggcgcagatcgactccggcgagctgaccggcgaggcgctgaccaacgccaaggccgcgctgtccaacgcgtatctggacggcgtgctctccgtgttcttcctggtcatgatgggcgtcttcgtggtagtcggcatcgtggtcgtggcgcgcacgttcgccgctggcaagtacggtgccgaaacgacgtccgaggagccgttcgtggaatcccagtggttcgcgccctccagcctggtcgccaccgcgcttgagaagaaggtgcagcgcgaatacagcgccaagctgcatgagcttgtgcggaacgggcaggttgcagcgtagtgcgtcattggctccccttttttcaaggggagccaataatcagcgaaaggagacaaaatgctcggcaaactcgttgccgtatggcacggcatcgtctggtatctgcgtgagatcagcggcgaggcccgctacgaccattatcttgagcatttcgcggccgagcatcccggcgaaacaccgatgagcgaggtcgaattcattcgcgcccgcgaggaatacgaccgtctccaccccaataccagttgttgctgctgacaggccgcaatagcataacaacaccataaaacccgcgcgccatgggaactacgtagccattcttccgttacaatcagtgtgacggcttccgcccccgaagaagaaggtgttaattccccttggacgtctcactggcgcatttcctccaacaagtgctttccaacccggctctgaccgtcacaacgttgctgacgctgggagtcatcttcgtcaacggctggaccgacgcacccaacgccatcgccacctgcgtgaccacacgatgcatgcgcgtacgctccgccgtcatcatggcggccatcttcaacttcctcggcgtcttcatcatgacgcagctcaacgcctccgtggcctccaccatcagcaacatggtcgatttcggcggcgacacgaacgcggcgctcatcgccctatgcgcggcgctgttctccatcgtcgtatacagcgtgggcgcctcgctgctcggcatacccacctccgaaagccacagcctgatcgccggcctgtccggagcggccatcgccatccaaggcggcatcggcggcatcaacatgggagaatgggtcaaggtgctctacggtctggtcgcaagcctcctgttcggcttcgccgtcggctggttggtatgcaaggccgtgaccctgatttgcgctggcatggaccgccgccgcaccaacgggttcttcacctacgcgcagatcgtgggcgcggcggccatgagcttcatgcacggcgcgcaggacggccagaagttcatcggcgtgctgttcctcggcatggcgttctgcaatggccaacccagcgtgaccggtgtgatgattccgatctggctcatgattctgtgcagcaccatcatgggcgtgggcacgtccgtcggcggtgaacgcatcatcaaatccgtgggccaggacatggtgaaactcgagaaataccaaggcttctcggccgatctgtcaagcgcgctgtgcctgctcgtcatgaccgtgctcggcatccccgtctccaccacgcacaccaagaccagcgccatcatgggcgtgggcgcggtacgccgcctctccgccatcaacttcggcgtggtgcgcgacatgatgctcacctgggtgttcaccttccctggttgcggtctcatcagcttcgtaatggccaaactgttcatggtcgtgttctagaaaggaatccacccatcatggcgagacaaaaagacacgttctacttcgacggattccgccgcagcgcggactacgcatgccaggccgcgaagctgctgtccgaggtcatgcacgacttcaatccgggccagctgcgcgaacgcatggacagcatgcacgcgattgagaagtcagcggacgaggtgcgccacgacatgatggacgaactggtgaccgcgttcatcacgccgttcgaccgcgaggacatcgacgagctcggccacgtgctcgacgacgtgaccgacagcatcgaaggcgtgctcaaccgcatatactacgacaacgtgaccgacatgcgcgacgacgcggtccagatgtcggatatggtggtgcgcgccacggaaagcatctgcgagctggtcaacgaactgccgcgattccggcattccaagacgttgcgcgaactggtgttcgccatcaacacgatcgaaacggacgccgaccacctgttcatcgagtcgatgcgcacgctgcacaccacctgcaccgatccgctgcaggtgttcgcctggcatgacgtctaccgtcacctcgaacagtgctccgacgactgcgagcgcgtggccaacaccatcgacagtatcgtcatgaaaaacagctgaggttggtttttcacaacctccctctgatgagccgagccgtgaagaaaacgccggaggcgtttttaggcgagggtgagtgacaacgagcgaataagaggtcagctgcaagctgtcctgaatcgcgttcgaggtggcatcgcgaagcgatgtcggagggagaggcctacttgaccaaaagccccctcacctatgggcgttgagccagaggatggcgagttgggtgcgattggtcaggccgagcttgtccagtatcgcgctgatgcgattgcggaccgtgccttcgctcaggaacagtctggcggcgatgtcgcggttatcgaggccctcggcgaccagcgcggtgatctcacgttcgcgctcgccaagcaggccctcgatggaatcggcggtatctctggaatcgtcggaatcggcaggatccggagttcgttcggtgagcttgccgagcacttccgcgccgagcaccacctgaccggccatcaccgcctgcagcgcgggcccgaccgccgccacatcctgtttgatgagatagcccttggcgccaagtcccatcgcctgcgcgatatacgactggtccgcaaacgtggtcaggaacagtatgcgcgcggccgggtccgtggccagaatctcgcgcgcggcatccaaaccgctggtgccgggcatctgaatatcgatcagcagcacgtccggtcggctcgccggtgtctcgaaataacggcgcacggcggcgtctccgtcatttgccatccatagcacctcggccgtgccggtggccgtcagaatcgtctccaacgactggcagacgatcggatcatcatccacgattgcgattctcatcaatccctcgattccatggtccaacgcttcttcggcacggatacgaacacacgccagccgtcctcatacggcccgcagaccgcggtgccgccaagggcgcgcacgcgcgattcgatatccgccaaacccatgccgcgcatcagctcatcggccgaaccacgcatatcggcaacgccgtcggcggcgagtcgcgagccgacgtgcgtggcgcgcatcgcacgcgggcgggcagcggccgtccgggacccatcggactcggacacggccggccccggatcctgaatgaccaactgccagaacgcggggaagtcacgcaacgtcacgctcgcctcgcgcgccgcgctgtgatgcaccacgttcgacaatgcctcgcgaatcacggtcgcgaaacagcgcgagaccggcgcaggcgccttggcgatatcgttggccagcgtcacggcgaaaccgggggagatgccgtcgaacgacgtgacggcatcatcgatctgcgcggcgaaatcagtgccatcatcctcaagatcatgcaccgaacggcgcaccatcgtcatcgcatcatccaacgtcgcacccaacgtggcgaacccttgcgcagcgaccgtatcgttcgtcgccttggccaccgttttgccggcctgcgcctgcatgatcgcgcgggtcagcagatggcccacattgtcgtggatctcccgggcgatacgcgtgcgctcgccgagggtcgccatgcgaatcgactgggcgcgttcctcatcgatgtcggcgatgcgcgaacgagtggcccgcgaggattcgcgcgccctgtcctgcgcgtgcagcaacgcgcgccgcgcctcgtccgaggaggcgcgggcccggcccagaacgaatccaagcagggcgaccagcgtcatcaccagcgtctggagacggtcggtgccacgggcgaaccagagcgcgatcagcggcaacacccatatccagcgcgcggcggccgaaagccacggggccgaacgcattgcatcggcaagggaacggcgagaggccgcggtccgcgagacactgggggagcggccacttgccgcagtccgtgccccagcccgggctccggtcgaggcgagggccggcagccgtgcagtatcgtaggcgatgagcggcatgaacgcgcaccatgaaggcaccgccacggcgatgacgagatacgccgtacacaagacccaagaccattgcgcgggacgcagccatgccaccaatccggcgacggaaacggccaacagcaggccggcgatgaacacgccatcggaccgtagcccgacaagccaggccaaagccaggcccaacacgagtagcaagcccatctcggccaacacgcgcatggcacctccccggctcgacgctcttccaccaccagtctagcggtgtgcggaacacgacgaacttgacgggcgtgcggaattacccgcatgacggtccaagacaacgggcctacacttcccgaatagatgaggcacaagcgtcggatgtcgtcgacacaaccgtaaagggatgataccgatgattacgcaaagccacagggcgtccaactattcgatggacgagatcagcctgatgccggtcgataaggtgtacaaggccatgcagaccgacgccgaaggactgtaatgacaaatgtcacgcctgtacggccaagtcgtgacgtttgcctgtggcggcgtccggccccttcttgggatgatggaatcgccaaggaagggagtgactatgacaaccgacaacagagcttccgaacacgactcgacaaccaacccggctctggccgtgcacgtcagccaactggtcaaacgctacggcgacatggtggcgctcgactattttgaccttgacgtgaaccagggcgagattttcgggctgcttggaccgaacgggtccggcaaaaccaccgcgatcaactgcatcctcgcgctgctcacctacgattcgggcacgattcgcgtgttcggccagccgatgacgccgacctcctacgcgctgaaacgtcgtatcggcatcgtgccgcagaacgtggccgtgttcaacgaactgaccgtcaccgaaaacatcgactacttctgctcgctgtacgtgccgaagaaaaccgaccgcgcgccgctggtcgaggagtccatcgaattcgtcggactccaggacttccgcaagttccggcccggcaaactgtccggcggtctgctgcgacgcctgaacatcgcctgcggcatcgcgcacaagcctaacctgatcttcttcgacgaacccacggtcgccgtcgacccgcaaagccgcaattcgattctggaaggcatccagcggctcaaccaggccggcgccacggtgatctacaccagccactacatggaggaggtcgaacagatctgcgaccgcatcctcatcatggaccacggccggcacctggcgctcggaaccgccgacgagctcaagaacatgatcgacacgggcgagcgcatcaccatcgaaacgctcgatctggcggattcggcgatggccgaggtccgtgcgctgccgtgcgtgatcgaagccacctacgacggcaaggaactcgacgtgcgatgccgtcgcggcgaacacaacctgaccgacgtgctcgacgcggtgaaacgctccggcgccaacatcggccacctgaccagtcgcccgcccaccctcaacgacgtgttcctcgaactcaccggcaaagcactgagggactgaccatgctcccctcagtcggcaagcaaataacttggctcccctctccgaggggagctgtcaccaaaggtgactgaggggagttcctgagtaaggagacatcatgtggaccacatttctggtcgcattgaaagcgaacttgcgtaaccggtcggcgttgttctggatgaccgtgttcccgattgtgctggcgaccatgttcaacggactgttcggcgggctggccgaagcatacgaactcaagccggtgccgatggccgtcatcgaagacacccgttggcagcaggcggacggtgcccgcaccttcgtagacgcgctggccggggaaacggaatcggcctcagacgacacgacctacgccgaaatcgaccaaaagctgctgaccatcaccacagtcgacaccgtgaaggaggccgaacaacggctcgccgacggcactgccaacggctatctgaccgccgacaataacggccgattggcgatgaccgtgagccgggaaaccgccgtcacagccaaggactccacgcaaaacagcggactggacattagcctcgcggccctgcgcagcgtcatcgacctgtacaaccgcaccgacgccgttacccggcagaccatcgccgacaatccacaggccgcgctcagccggaacttctggaacagcgtcgggcagaacgtcgacatgacccatgagacgacgctcacgcatttccagcctgacgagatcgcccgatactattacgcgctgctggccatgtcctgcatgatggccatgggatactccatcagcacagtcgccgccgcacaggcgaacctgtccgcgctgggcatacggcggaccgtagcgccgctgagccgggccaaacagctcgtcgcgggcttcctctcctgctggctgtgctcgtcggtcgccctgtccatcgcattggcctatatccggctcgcctgcaacgtctcgctcggcggacgcgaaccggcggcgatcctcgcggtcatcatcgcctcgttcatgaccagctcagcaggcaccctgctcggtgcggtgccgaagctctcgtacaacacgaaatacgggctgtcgaccggcatctcctgcacgctgtcgctgttcaccggactgtacggcgggtttgccatgcagatcagcgactggatagcccgcaacgcgcccatactcggcaccatcaaccccgcacagcaggtgacgaacctgttctacgacatcctgtactacgacagctaccggccgttcatcaccacctgcatcattctgctggcgatgagcgcggtattcctcttggccggcatcgcaatgctgaggaggcaacgttatgaacacctgtaaagccacgctgcgcgtgctgttcgcgcaccgggtctacctgatgatctacctcgtattcataggcatcctgatgatgtccatcagctgggcgatgctgacctccgcatccggctccatgtccgcggtgttcgaatcgaccaagacgcgcgtcgccatcatcgaccgcgactccgaccggggtgatatcgccacgtcgatgcgcgcctacctgcgcgattccagcgaactggtggacctcgacgacaccagcgaaacgctgcaacaggccgtcgcctcgaactgggtggacctgatcgtcatcattcccgatggattcgctgacgattatgtcgccgcggcggcggacggcgacaatccgccgaacgtggacacggttaccagctacgcatccggctccgggtcgatggcgcggatgaacgtcggcgggttcctctcgctcacccgcaccgcactgatcggcgcgcagacgagggtcgaccaggcggcgctcgccggcatgatgaacgctacaggaggggccgccggttttgatggcgcgagtctggaccaagacatgctggactcgctgccggaagggcaagtcgacaagccggatatcaaggatctgtcccaggccgccaaaatggccgccgaatcggccagcgatacagacgtgaaccatcagatcgccgtggtcgatacgccgaccgaggagtcggcaagcgctgcggatacggcggtcagcggattcggcggcaccatgaaaaccgcgctgtacccgctgtccctggcgatgaccatctgcggatcgatgatcctgggcgcgttcaccaccggcgaggtgcggcggcgtctcaccgcctcgccccgacgcatggtcctgatgggactccagcggttgctgacgttgggcggattcgcgctcgtcgtatgcgtcggctatttggtgctgtcaatcggtctgatgatggcggcggggctcgatccgttgcacctgagcgtcgggggagtgctgatgacgttcggcgcgacctgcgtgtacgcgctgatgaccgtcgcctgcggattcatgctcagcgagttcgggctctcggaagaggcggccaacgggttcgccaacatcttcggcctgctcatcatgttcacgtcgggtgtcgcattgccgattgacatgatgcccggcgtgatggtgaccatagccaagttcctgcccggctggtggtattgcaccgcgatcgacaacgcgctcggcttcggcacggcggcggaaaccggcataagcgtcgccggctggtccggctcgctgggattggtcgcactgttcggtgtgatgttcatctgcatcggcctggccgccggccgcttccgccgatcccgccccgccctggccgcgcccgccaccacgcagctggccgagtgagaaatcagcctttcaaccgataccgctgtgccgggtcgtcggcgaacttgactcgggcgacccgcccttccttcatcagctcgcgcataccggatgtggcggccagcggcgtcaactgcagttcgcgcatgatctccttgacgctcatggccgaatgccgctccagtacggtcataatcgccttgaccacgtcgcccggtgaactgttcgccatcgtgcgctgcttggtgatggtcatcgtgaacgtgttgatgtcgttgcgcgtggtcgccggctcgatgccggcctcgcgcaacgcggcggcgatgcgctggtagccgtcgccgccttccgggttcacaaacccgccgcccggatacggcgtggactccagcagcgtgaacaggaactggtttcgggtggagacgaacggcgcgcccgtcaccggatgagggctcgccagcacatcatgtgtcaccatgccgtacaggccacccggattggtgatctcgatgcgatcggtgaacacgctgatatgcacctgcgtgccgcgcgcatcgggcgaataatcacggtgggtgagcgcgttcgcaatcgcctcgcgcaacacgagcggcggatagtcgggcttcttcgcgccaatccaacgcatcaacgagtcgaccgcatcgtcgatcatcaccggaatcgaaccgaccaccgacttcgaggcgaccaatcgttcgtcaccccggaacacatcgtcccggctcgtccccggaaacacggcaatcgaaatgccgagccgcggatagaacttctgcggatagcggcccaacgccagcagtccggccaaggtggggcgcaggattccgccgacctccgactcgtcggaatcatcatggcgcaacacctgcagatccagcagcacatcgatgccgtctcggtcggcgaacacgcgcggatgctgttcgcgcacgcgtgccaacagtccggcaacaagctgcgggtcgaggtcatcggtcgtggcgtcgggcacgatatccagatcgtatgtgggctgcagatgctcctcgatgagccggtcgacctcataggaggtcatgcgccggtcgccgtcgccggtacggatgaacgagccgccgtgcggtccgagcgcggtggtgaagcagggcttgtcgcgcggcagcatctcgtcgatgcgcgcgaacaccagattcgcgccttcgaacgggcaggtgacgatcacgggccgcaccaccggcgtcatcttctcgcacgcctggctcagcgcctcctgcatggcgcgcgcgtcgaatccctcgaccggcgtgaacccgttcttttcggacaggcccaggataatccagccgccggagccattggagaacgcggacagcgtatcggtgatggtcgaggagatcttgcgcttgcattccttgacctcgcactgttgcgtatcgttgccgatcagacgcatgagttcgatcagctcagtcattttggcagtatagtcatcgaccatggcggcctccttgaaaccattgtgccccataatccgccgcccgctcgcctccagccccgccagttcaccccaattcatgcagaattcatgggccaaaccagacgaaacgaacgtcgatgtagggttcggttccgcgtgttcgccgatgatatcggccggtcgaggcgggcgggctatgttgggtggcgtgggaatcttgcgcgtgattgatgctacggctgtgtgcttcgctctgggtatatccggcccgatcagcgggactcagccaatgtgatgccgcccgcagccatctgcttgcgggccgcaacaccaagttcctcgctgaccggcacggtcagatcctcgaacacggtgacctcgaagccgagcttcttggcatcgagcgcggtgtccttgacacaatgcgattcggcgatgcccaccacatccacgcgactcacgccggcggccttcagcgcgttggccagcgtcttgccggcggattgctcggcctcgacctcctcgcgggtctggatacggtcggtattgtcctcgataccctcaaaaccggaatatgccgccgaatactggcccttcttgaaatgatgctcgatattcagcgccttgatcgccggatgcaattcggcgttcagcgtgccggccgcaccatgcttcggccacgtgtccacgaaatccggctccgccgaccagtgcgcgcccggctcgatatgccagtcctgcgtggttgcgatatacgcgtactcgctgcgatgcgcgttcacataatcggcaatccgctcggcgaccgcgttgccgcctgcgacacccagttcgccgccttcacagaacgtcggctgcacatccaccacaatcagtgccttggtcatcgtcattccccttattgccttggattcgttttgaatattgtctcgaactcgacgtgcgattgctctcatcatagccatgcgcggccctgtgggaaacgttcgggcttacactgcaagcagcaatcgaatacaagaaccaggggagggcgaccaagaccatgctggaccatctgacgttgcacgtgaaagacatcgaccgtagcatcacattctacaaacaggcgctcgcaccgctcggctatatcgtcaaggcgcatcatgagcccacgctcggattcggcgtggatgacggaaccctgcactccgatttctacgtgtcaccgattgaagggctggaggcggaggcttcgccggtcacgccggtcacacacatcgcgttcttggctgacagtcagcaagccgtgcaggcgttccatgcagccgcgctcgccgccggcggccgagacaacggcgctcccggtccgcgcccgtaccatcccggctattactccgcattcgtgctggacccggatggcaataacatcgaagccgtcgtggattgggctcattcgaacgagtaaaaacatatccgtatcgtgcctcaggcggcatcgacggcgtaggctccaaccagtcggatttgtggtcgcaacggcggtataggtcacatcacgcaagcgtgaaggtgatggtctgctcggcggtttcggtgccgatccatgtgccggctttgcggttccaatccatgccgtccgcgtgcagtgcatcaatgccgtattgacgtgcatgcgtgaccagccagcctgccgtctgccagcaaagtcgagtgcggttgtcggcggacaggccgtccggcagcgtgatcgccaacgttgtgctggccgtattggtcgcagcgccgttgttcgtgccggttttgccatttgggggcacaaccgagacattgacattcggcagtgtacctcctatggcggcaaccaacccgtccgtgtccgaggaggttgctggctccaacgcgcacgtgacgcccgccgaccgttcaccggtcaaccccgaggcccaagcgcgtgccatcgcatcccatgtggcatatagttccggatagcctgagcgctgcacctcctgcgcggcgtcctccaccggaatcgtctcccaatccggcacctgcagcagatgatcgtagaagatgtttgtcgcataggtcatgtcggacacctgctccgccgtgccccagccttggctgggccgctgttggaacaggccgatcgaatccaagtcgccgtagtccagattcgtcagcctcgactcctgcatggccgtggcgatggccaccgtcgccgcgtgatccggcagtccgcgcgtgacggcgatgttcgcaatcagcgccgcgttctgcgcctgatcaggcgtcaaggtgcggcgggctccgtcggacgacaccgccgcgcaatatgcttcctcggccgtgcgcgcggtctcgcgaggcgtgaatagccgtggcagcagcgtccatgccgcgatcagcgccgcaacaacaagtatgacggctgcaatcagcgcgcccgcgccatgggagcggcgtctgccgtaccgcacctgttgtcccattgcgcctccaatatttcggtgtcatggctgactgtgaccggctggcctatgcagcatgcgagatttgccgtgttccggctcggccgtcatcatgacagcgtggcatatccacctgaacgacggctgcgccatcacgcgactttgtgacaattcttcacgcttcctgacatccgcgcaaatcagcccctcgaaaccgagaatggcggtcgggattgctccgacaccaagggagctgctgccgctattgtgtgaagggcgatttgtaccgggttgaaggagaggaacacatggcacaattgcagccgtactgcgcgattgagggcaatgatgatggattgcccgtcgtgttcgtgcatggcatgggtgtggaccatcgctcgctgatgatgctcgacaaggcgtttgacggcaatgattcaattcgacgtatatatctggatctgcccggtttcggccgtacgccggcattgcccgagcatgcctgcggactgccggaaatagcggattggctgcaaacggccattgacggtcttgtcggtaaagcggctccattcgccatggtcggcaactcgatgggcggtgcgcttgtccgcgaagtattggcgcgcgaacctcgccgagtggccggtatggcattgatcgcgccggtcgtggacccgcagcatgccggccggcatgtggccgaacatgtggttgcacagcccaatcccaagctgacgcactccttgccacaggaccaggtgttcgatttcgttaccatgggcgtcaaccagtcattcgacgcatggcggcgctaccagcggttcatcctgcccggcgtggcgttgtgcgaccgtgcggcatgcgaacgactggatcaacgttattggctggccgataatcccgaggaaatgctcggcacatatgcgggtccggtgctcatcgtcaccggcaagcaagaccagatcgtcggatacgaagatcagcaagccctgttgccgcactatcccaacgccaccttcgtgacgctggacaatgccggtcacaacgcgcacatcgaccaacccgaagccgtcatcacgctcgtgcgcgaatgggtggctcatatggcgttcgctccgttgagctgacggtctgctgacagtctgccgaagcctatatgtatacgagcgaccaatgccggttgacgcaatacgccttgcaaggtatatcgtttttcgatatagtcatatcgatgttcgcggtgtcgccaaaaaaaacgtcggcacctgaaaggaccgggctatgaaaaactacatgaaccgatgggtgttgctcgcgttgaaagccatcgtgattctggtctggctggcctgcctatggggccaactattcgccgtaccgggattgagcggcgcgctggccggcctctacccgagccagacgtcgatgcgctggccatatctcattatgggcgtgctgttcctgttctgcatcgaagcggcgttcgtggccgtatggaaactgttctccttgtccggctcgggcgcgaactcgagcaggtgatttgagatgacgattcgcatcaatctcgacgtcatgatggccaaacgcaagattggcgtcggcgagctcgccgaacaaattggcatcactcccgccaacgtgtccattctgaagaacggacgtgccaaagccgtccgcttcaccacgttggacgccatctgcaaggcactcgactgccaacccggagacatcctcgaatgggaagatgacgattgatcgacacgccaccggctcgaactcatggttcaacttgtagtctctctcaaaatcaatgatgccctatcatcctgcaagacgatagggcatcatcatgtgattatgcgcagctgatatgttgcgttgttatcactcggcgtccgcggccggtgcctccttgggcgcagagaggaagtgctcctcgctgggcagcacggtgttcaggatcacggccaccacgaacgccacggcgatgcagttcgaggcgaagatttgttggaacagtgccgggaactgcgtgaagatgtcgctcacctgggtgaagccgatgccgatggtcagcgaaagcgccgcaatcgtgatgttgcgctgcgtgaagcccgcctcggcaatcatctggaagcccgaaagaatgatgttgccgaacatcatgatcgtgcagccgccgagcaccgcctgcggcagcgagttgaacacctcggcgatggccggcacgaagctcgccagcaccagaatcagtccgccggagagaatcaccttgcggttgacgaccttggtcatggccaccaatccgatgttctgtgcgaacgaggtcagcggcagacagccgaacaggccggatacggtggagatcaggccgtcgccggcgatggcgcccgcggtctcgcgttcggtgggcgtacggttcaggcccaccttggtcagcgcggcggtgtcacccagcacctcgaccgaggagacgacgtagagcaggccgatggagatgatcgagccccagtcgaactcaggcttgaacggcatgaactgcggcacggacacgatggcgaggttctggaaaccggagaaatcgaccttgcccatgcagatagccgccacatagccgaccaccagaccgaacagcacggacagctgcttggccgtgcccttcatcaacagctggaacgccaggcaggcaaccaaagatataagcccgagcgtcaggttctgccaggaaccgaagtccttggctccgctgccgccgccgaagctcgtggcacccacgttgagcagcgagaagccgatcgacgtgaccacgatggcggagacgatgggcggcacgaaccgacgccaatacttggccgtcaaacccagcacaagttccagcagaccgccgaccattaccgcgccgaccaccgcgccatagcccttgtccgcgcagatcgccacggcggccgccacgtaggtgaaggagatgccggtgaccatcggaagtcgcgagccgatgagccacgcgccgtacagttgcaggcaagtgcccaggcccgcaaccagcaggccggactggatgatggtggccgattgggccggggtcatcttcgcggccgaggcgacgatgaagatcggggcgaggttcgccacgaacatggccatcacatgctgcaggccgaacggaatgcccttccagaaggatactggcgcgtccagcgaagacaacgcctcaaaggatacggaatgattggttttcttctctgacatgattctcttcttctctctgttgctcccgccggcgggagcagccaatgtgctcagtgcctaaatgtgatttcgccggtctcgggattcatggactcgacgatggccagcgaatccacatcgtagccttcagcgcgcagcgcgtcaccgccgccctggaagcccttctccacggcgatgccaatgccctcgaccgtggcgccggctgcttcgcacagatcgatcagaccgcgcaacgccttgccgttggccagaaaatcgtcaataagcagcacatggtcgccggcgttcagatacttcttggccacgatcaccgggaactccttctgcttggtgaaggaatagaccgtggtggtgtactggtcgccgtcaaggttgatggactgcgccttcttggcgaacaccaccggcacattgccgaaatgctgggccgccacacacgcaatgccgatgccggacgcctcgatggtcagaatcttggtgatgtgcttgccggcgaaatgagcggcccatgccgaacccatgcggtcgaacaggcgtacgtcgcactggtggttcagaaacgcgtccaccttgagcacattacccgccttcaccgttccctcgctttggattcgctcctcaagttcctgcattgaacctcccattgttgtatgtcagtgaatgatatggatactcgtaagtgtacgttgtcctgcgctgacccgtgcatgtggtaaacatgaatgtcgcgattcaaagggaggcaacagtgtacgacgagccggaagtcatcgcacgcagcgcacaggaactcgtgggcgacctgaacccgcagcaggcggaagccgtgcaataccgcggtcaggcgctgctgatcggagccggtgcaggctccggcaaaacccgcgtgctgacccgccgcatcgcctggatcttgagccagttcggcgcatggccgagccagattctagccatcaccttcaccaacaaggccgccgccgaaatgcgcgaaagactcggctcgctgatcggcccggtggcccagcgcatgtgggtctccaccttccactccgcctgcgtgcgcattctgaggcgcgacggcaagtccatcggactcaagtccggcttctccatctacgattccgccgactccgagcgactcgtcaaaatcatcgccaccgaattcaacctcgacatcaagcgctacactccacgctcgattcttggccatatctccgacctcaagaacaatctgaccggttggaaggaaaacctcgccgttcacgcgcccgacttcacgcccggccagcgcggctaccagttcggcacggtgggcgaccttgaagccatctacgcggtgatctacgccgaatacgagcatcgcttggccctggccaacgccgtcgacttcgacgatctgatcggccgcacggtcgagttgctgcgcactgacccggccgtcgccgagtactaccatcaccgcttccgttacattctggtcgacgagtatcaggacaccaaccacgcccagtacgtgctcgtgcgcgagctggccggcgtggacacgggggagaaggccatcccgggcgcgcctaacgccggcaagtccggccccgcctggatcaccgtggtgggcgattccgaccagtccatctacgcgttccgtggtgccgacatccgcaacattcaggacttcgagcaggacttcccgaacgccaagaccatcatgctcgaacagaactatcgttcgacgcagaccattctggatgcggccaacgcggtgatcagcaacaacgagggccgcaagcccaagaaactgtggaccgcgctcggcaagggcgagccgatcgtcggctacgcggcggacaacgcccagcaggaggcccagtgggtagccaccgaaatcgcgcgcctgcacgccgaagcgggcatcgcctactccgacatggcgatcatgtaccgcgccaacgcccaatcccgctcgctcgaagaggcgctgatcaacacgaatcagccgtatcagctcgtcggcggcaccaagttctacgaacgtcgcgaaatcaaggatgcgctggcctatttgcaggcgctcgtcaatccggacgacgatgtgaatctacgccgtattctcaacgtgcccaagcgtgggcttggcgaccgcgccgaaggcgtgctgctcgcctacgcgcgtgagcatggcaccagcttcttctacgcactcatgcacttggatgagatcgaggtgccgacacgcaccgccacctcgctacgagcattccgcgatctgatgggcgcgctctcgcagttcacgcgcgcgcacgactccaagcccagcgagatcgtggccgaagtattggagaagtcgggcttaagggccgaactcgagaaatccgtggacccgcaggacgcctcccgtctggagaacctctcccagctgcagtccactgccgccgaattcgaacagaacacgcctgacgccacgttgtccgcattcctggagaccaccgcgcttgtggccgactccgaccaactacccggcgaggcggaggactccggcaaggtgacgcttatgaccttgcacaccgccaagggcctcgaatacccggtggtgttcctgaccggcatggaacagggcaccttcccgcattcgcgttcgatggaagacaccactgaactgcaggaggaacgccgactcgcctatgtgggcatcacgcgcgccaagcaaagactgtatgtcacgcgcgccgccgtccgctcccagtggggccaggccgccgatatgatgcccagccaattcctcgacgagattccggattcgctgattgattggaaacgccgtgaagccggcgtggagcgtatgcgcgccagctgggagaccgatggattcgccgacgatttgggcggctgggatgatgacgatttcggcggtgccacgtttggcgggtcgtcgacgttcggctcgcgtggttcgtccggttcgggttcgtcctatgggtcgcggtcgcggtatgggtcgtcgtatggctcgggttccggctcttcctcgtacggttcccgttcatcgtcgtatggttcccgctccggctcgtcctcctatggtttccgctcccgttcgggttcgtcctatggttcttcaggctccggttcgaggtcgtcctacgggtcgcgttcccgttccggttcttcgtccggttcatatggtggcacccgtggcggcaaagtcaccacgcgccgtaccgcaccgaaatccgattcgaccggctctgccgtgcccagctcgaagctcaccaaggacaatggcctgaatatcgccgacttcgccgtgggcgacatgatcagccacgaccagtacggtctcggcaaggtcaccgacgcgcaagacaagggccgcaattcggtaatcaccgtggacttcggctccgccggcgtcaaacgcctcatgctccgcgtagcgccgattgagaagttgtagataaattggcccctctgacgaggggctgagttatataccaaataaattcgcaaaaaacaagacttgtgttcttcatcacagtgtgggcataatgcggaggttgtgcctacgagccctgggaacaggggagaggaaaaagtagttatgaagaacaagctgtttgcatccgtgcccaatattctgttcggcgcgctgatcaccatcgcgccccagacctttgcgcacgcctgcaccggccatgacatgccgggtgcctgccactactcgcagcaggcggccaccggcatcggcgtcgtcatcctcgtgttcggcgtcgtggctttgttcgtcgccccgcagattcgcatcggcctcaatatcgccgccgcagccgacgccctgctgctactcgccgtacccacctttctgatcggcatctgcaagggcgcgatgatgcactgccgcatggttatgctgcccacgctcatcgtgctcggcgtgctcaccatcgtgttcgcggccatcgccatctggctcgactctcgcgccgccaagcgcaactgatcgagcagacggccggagcccagccattgcgaacgctggactccggcctcgcttattgcaaccgcactataagcaacataaggactcatcgtgccatcccatatcgcattgcgcggccttccgattgaaaacctcaaacgcaagccgttccgcaccggcgcactgctcgccgtcgtcaccatcctcgcgctgacattcttcggcggcaccatgctgaccatgaacctcaacactggcatgaccagtatggaaaagcgcctgggcgccgacctcatggtcgtgccgcaaaacaccgtgcagaaggccgaagcgctgctcaccaacggcaatcccagcactttctatttcaccaaagacatcgccgacgaggtcatgcaggccgacggcatcgcacaggccaccgaacagacctatatatcatcgctggccgccgcctgctgtgccgaaaagctgcagatcatcggttacgacccggacactgacttcgtcatcgaaccatgggtcgcctcccagttcgaaggcccccttgaagacggtcagatgattgcaggcgcaaacgtcaacgtgtccaccgacggcaccatcgaactctacggccgttcatggccggtcgtcgcccagctcgccaacaccggcaccagcctcgacaactcggtgttcatcaaccaaaacaccgtgcccgacatggtcgccgcctcggccaaggtctccaagcaggtcatgtccgccgaatatgccggcaaagccgtctccaccgtgatgattaagacgcagcaggggtacgaagcgcagaccgtagctgagaacatcaagcgtcttgattcccgattcgccgatttggggtacgtataccccggcggcatcaccgccaacaccagaacttcgttgaccgcgcttgtcacctacctcaagattttcgtggcggtgatctgggtaatgggcgtgattgtgctgctcgccgtattcgcctcgtcggtgaacgaacgcaaacgcgaattcgcgtccctgcgcatcatgggcgccacgcgcggcatgttgaatgccatcattctgaaggaatccgccatcatcggtctgatcggtggcgtaatcggcgtcggcgcggccagcctggtgattttcccattcagttcgctgatcggcaaacagcttcaattgccgtatctgcaagccagcccggttgcggtgatcggattcattgccgtgaccattgtgtgctctacggtcatcggcatcatcggttcgctggccaccatgtggcgtctcggccggcccgaagcctacctgaccctgcgagagggggagtgatatgactgagacaactacgccgcttcagccgaccacggttgagccgaccaagctccagccgaccacgccagctcagccgaacgcgccgactgcgccggattcgccgcacgtaaccgagacgccctccccggaccatctgctgaccttgacggacctgacccgccagttcgtccgccgcggcacgccgttcgacgccgtcagccacgtgaacctcaccgtcgatgccggcgaattcatcgccatcgtcggccggtcgggcaacggtaaaagtacgttgatcaacatggtcgctgggctgattcgcccgacctcgggaaccgtgagcgtggctggacgcaatgtggccgacttgggcgataaagcactgtccgtgctgaggaatcgcaccatcggattcgtgactcaaagccagaccctgcttggcaacctgaccgtgctcgacaacgtgattctgcccgcaacgatgtttccggagccgctgccgttcgcccaaaacgcagaagcaacggatgccgtggcgcaagccgctgccaccaatgatgaagcggccgccgattcagccgccgacccgttcatgccggatgtcattgcgccaatcacagaccaggaaaacacgccgtcaaacacggctgcgagccgttcggacctgttcgccacccgagctcgcacgctgctcacccagcttggtgttgccgatctggcagacagctacccgcgcgagctgtccggcggtgaaatgcggcgcgtctccatcgcccgcgcgctgatgaaccagccgagcttgctcatcgccgacgagccgaccggcgacctcgaccaagagagcaccgacatcgtaatgcgtctgctcagagaccaagccaacaacggcacggcgattctcatggtcacccatgatcccgatgcactcgaatacgcagatcgggtgtatcgcatggacgccggagtgctgtccatagcctcggtgtaatatggtctgctggtgtctgccaacaggtagataccgtctggagtcatagcccatcagcgggtcggcggtaggtaatcgcaagaaaaccaacccgttcgtgtttattcacgacgaagcgctggggaggcccgactcagcgcttgttaggcatatgcaaggcaagcgttccgttcagataacgacagaaggattaatccaatgacgaacgttcagcgttctcgccgtcaggtgcgtctgtctcgcgccctcggcatcgcactgacccccaaggctcagcgcatcttcgaaaagcgtccgtacgctcctggcgagcacggccgtgaccgccgccgcaccgagtccgattacgcggtgcgtatgcgcgaaaagcagcgtctgcgcgctcagtacggcatctccgagaagcagcttcgcgccgcttacgagaaggccacccgtactgccggccagaccggtaacgccatgctgaccgacctcgagacccgtctcgacaacctggtgctgcgtgccggcttcgcccgcaccaccgcccaggcccgtcagttcgtggtgcaccgtcacatcctcgttgacggcaacatcgtggaccgcccgtcctaccgcgtcaagcccggccagaccattcaggtgaaggccaagagccagaccatggttccgttccagatcgccgccgaaggcgtgcaccgtgacgtgctgcctgcggtccccggctacctcgacgtgaacctgccgtccctgaaggccactgtgacccgtaagccggaggtcgaagagatcccggtgcaggtcaacatccagtacgtggtcgaattctacgcccgctgatccgggccctctggtcaacaaatccaggacataccgctcgaaccccgcgcttctttcgagaagccgcggggttcctgcgttgtagggcgattactggccgcacaccgcctggcgaatcatcgtcgcgtacgcataggcaccggtcatattcggatgaatgccgtcatcgttgaggtattcgctatgaccttcgctatacccatgccaatcgatgatgcccacgttcttgttcttcttggcggcctcacgcagcatcgtattgttgttgttctcctgccacgggtatggcatacggatggtgatgaagtatgtcggcttgccgccggtcaggtcaatgagctgttgcacttcctgctcattcgaaatcacgccgttcgtgccgaggccaaacaccaccacactgccactgtggccggcagcggtgtcctgctgatacacatccaccgcctgcggcagctgacggttcggcaggccatcgataaaagcgttcgggaatgcggcctggatggcgtccgaagtacccgacgtcactgaatcgccgaccatcatcatatccgcgttgcagctttccgttgccggatcataggcgtacttcgaaatgtcaagattgtttggcaccttttccgcaatcggtttgatgatgggcggctgagaatccgaaccgttcttattcgcgtcagcggtattggtttcgccgttcgcggcatttatggcagaagactcgggctcgggcttcgccggtttcttgaccggcttggcgggtgccgtgagttcggggcgcagctgaatggctcgcgcttgagcgatgccattccagtccaccggtgcccacgtcagcgccacaacggtcaccaatccgataaccgacatgacccacgcgcccgggcgcagctggtagccggctttcggcagcggcttggcgtgttggctgcgaggcatctgcaccgatttatgggccgcctcgaccagctggtagaaggcttccgacgccgccaacaccacgacggcctcaagaacccaaccccaccacggcaacgcctgcgttcgtgtcgccgggttcatgaactgcagcagcggataatgcatgacgtacagcgagaacgatcgcgacccgatatagcgtaggggagcgcaacccagcacgtgcgaccagattgagtcattgttcacggcacaggccaaggcacacaacgatatgaacgcggtaatcaggtacccgccttggtacatgtacgacagatatccgttggcgaaccagaatccggccagcagtgccgccaaagccgcggtgccaagaacattgcagacgatagtgagacgggtgcccgtcttgtcgccggcctgacgttcgatctgcactgtttgcgaagccgctccagcttccgcaacttccgtacctcgcgaggaaggcgcaatccagatagccaacagcgcgccggcggccagctcggcgaggcgagtatcggtaccgtaatacacgcgggaggtattggccgggtcaaacagcagccccatggcggcggtggaagcagccatgatgacaagaatcgccatggagcgcacccatttggacttggtgattttgccgagcaccaccatcagcaacggccaaaccagatagaactgcatcgtcacgcccaagaaccacagatgggtcagaggagaaggcaatccggccgcctcgaaatacggcaccttgcggaagatgtacacccaattgctggcgaacaaggcgctcggcagcgaatcggaaaccactttctgcaacaggctgggagcgaacatccaagtgagccaaggcaccacggcaatggtcgccagcatcaccggccataaacgagtaatgcggcggatcagatatcggccatatccaaaggacccggtgcggtccaccatgttcagtaccgaacgtgtggcaagaaaaccggtgataacgaaaaacatcgtcacgccaatgaatccgccctgcaatagcgacgggcgggtgtggaatgctatgactccaagaatcgccagagcgcgcagtccatcgatacccctgaaatgggcaggctcagacgattgagatggtgcagatttcgaggttatgctcacagtaccctaagtgtactctcaggaatcgttaggtatactgcccggattacgcatatctcaggtagtgacctatgccgttatgacttatgactttcggcagcccgcaccgaaaccgccggaatggtgacataatcagaaccatgattcttcatctgcatttggtccgtcacggacagacctatttcaaccgatacaaccgtctgcagggatggtcgaattcgccgctgaccgagtcgggcgtcgccgatgccgtcaaggccggtgagcgactgaaaggattgacgttcgccgccgcctactgttcggacaccacgcgtgcccagcagacggccgagaaaattctcgacatcaacgaagccgcgggtaacccgcgccccgcactcgtgacggacatgcacttccgcgagcagttctacggctactacgagggacttgacatggccatggcctggtacgccgcgggagcgccccacggcgtcaaaacctacaaccaaatcgtcgagaagttcgggttgggggcctcgcgtgattttctcaaggaagccgatcccttccacgatgcggaatccgatgaggaatattggacgcgcgtcgaaggcgcgttccgtcttatcgccgacaacccgaatctcaaggacggcgacgatgtgctgcagatttcgcatggcaacacactgcttagcctcggtcaccggttcggcggccctgacctcgatctgaacgaacgcccggccaatggttcggtaaccgtgctcgacttcgacaccgacaagccgttcggcgaagccgtgaccatcgtttcgtacggcaagtagcaaatagcaagcaatacatatcgaatagcacgtacggtccacggcggcacgccgcaaacgaaagcgtcagcaggacagcctttcgcctatagccgcatacgcccacgcgcacggttttcgccctgcgcatgcaatggtatgccaagaaatagggaaggagtgctacccttaggcgagtaagtgtgaccgcaaggaggaaacaatgggagtcggagagatcgctggcctgatcgcggccatcgcgttcgcagtattggccggtttcatgatctatccgctgatcaggctgggcaagatgtttgatcagatatcgcagacggtccgggagtccggtgaacacgccatccccgctctggacgaaggcgtgaccaccgtcaagcaggtcaacaagtcgctcgaagacgtgaacaagatttccgccgcggcttccaccaccgccaacaacgttggtgcgttgaccgatctgtatggctccttcctcggtaagcccatcatcaagatcgcttctatcttctacgcgctgaaaaccacgggtcagtccttccttgcgaagaatgccgcgaaaaccaccgtcaacgacaccgccgagaagggggagtgatgttcaaacgcatcttctgggtcggcgtcggcgtggccatcggaatcgttgccgtcaccaaggcacaggcctatgtcaaggccaatacgcctgatgcggcacgccagttcctgcttggccccgatcaggacaatgtgccgatgaaaacactcgaagggttggtcaacgagttcaatgccacccgtcgagcccgcgaggctgagctcaaccgtcagtacatcgagcgcgacaactgacacgcgcatgccgccttgccatctaatcactgaatcagctagaacaaactagtcctcataatccagtctttttccaccaataccaggcgcaactgcgcccattacccaaacaaggagttcatccgctcatgcgcactgcggacatcgcaaagcgatacctcgattattttgccaagcacgaccatctcatcgtgccctcggcatccctgatttccccgaaccccaccacgcttttcaccatcgccggcatggtgccgttcatcccgtacctgatgggtgagcagaccccgccgaagcgccgcatggcctccaaccagaagtgcgtgcgtacgctcgacatcgacgaggtcggcaagaccacccgccacggcaccttcttccagatgctcggcaacttctccttcggcgactacttcaaggaagaggccatccactacgcctgggagctgctcaccacctcgcaggatgagggcggctacggcttcgaccccgagaagctgtggatgaccacgttcaccgacgatgacgaagcccgttccatgtggatcaacgagggcgtggaccccgagcacatccagaagatgggcatggaagacaacttttggaccaccggtggccccggacccggcggcccctgctccgaaatctacgtggaccgcggccccgccttcggcaaggaaggcggcccgattgccgacgagaaccgctacatcgagatctgggacctcgtgttcgagaactacgaggtcgacaacgtcaagtccaagaccgacctgcacatcgtgggcgagcttgagaacaagaacatcgataccggtgccggcttggaacgtctggcctacctgctgcagggcaagaacaacatctacgagaccgatgaggtcttcccggtcatcgaggccgccgagcagctctccggcctgaagtacggcgagaacgaggacgccgacgtgcgcttccgcgtggtcgctgaccacgtgcgctccgccctgatgatcatgtccgacggcgtgcgcccgtccaacgtgggccgtggctacgtgctgcgccgcctgctgcgccgcaccgtgcgctccatgcgcatgctcggcgtgaccgatccggtgctgcccaccctcttcccgacctccaaggccgccatggaggccagctacccggagctcaacgacaccttccatgaggtgtccgaatccgcgtatggcgaggaagacgccttccgccgcacccttgagaccggcaccacgattctcgacgtggccgtcaacaaggccaagagcgattccgccgagcccgtcgtggccggcgaggacgccttcaagctgcacgacacctacggcttcccgattgagctgaccctcgagatggccgccgaacagggcgtgaaggtggacgaggccaagttccgcgaactcatggccgagcagaagtcccgcgcccgcgccgacgccctcaagaagcgtcacaacgtggatctttccgtttacgacgacttcaagaagacgctcgtcagcccgattgacttcctcggctacaccgacatgtccgcccgcgccaaggtgatcggcatcatgcaggaaggcaagggttccgtgcccgccgtgacaggcccggccaacgtcgaggtcatcctcgaccgcaccccgttctacgcggaggccggcggccagctcgccgaccagggcgagatcctgtccgacgacggcgccgtgctcgaagtcgacgatgtgcagaagcccatcaaggacctcatcgtccaccagtgccgtctgaccgaaggcacgctggtcgtcggcgccgaagtcaacgccaacatcgacctggcccgccgtggcgccatcgcccgctcgcacaccgccacgcacatggtgcacaaggcgctgcgtgaggagctgggcccgcaggccacccagcgcggctccgaagacgccccgaaccgtctgcgcttcgacttccagtggtccaaggccccggccaagtccgtgatctccgcagtcgaggagcgcgtcaacgacaagctgcgcgacaacctcgccgtgaccaccaaggaaatgaagttcgacgacgccatcgccctcggtgccatgcacctgttcggcgagaagtacggcgacatcgtacgcgtggtctccatcggcgaagacggctggagccgcgagctgtgtggtggtacccacgtggaccacgttggcaagatcggcatggtcaacatcctgtccgaagcctccatcggctccggcgtgcgtcgtgtcgacgccgtcgtgggccagggtgcctatgacttcaacgctcgtgagcacgcgctggtctcccagctgtccgacaagctcaacgctcgtccggacgagctcgccgagcgtgtgaacgccctgctcgccaagctcaaggaatccgatcgtcgcttggcctccatgtacgagtcccagctggccgcctcggttccggcgctggttgctgacaccaagaactccgcggccccggtcaaggtggccgtcaagaacgtgggccacttcggcgcggtcgatgccctgcgcaagaccgtactcgacgtgcgcgcccagctcggtgaagacgcccccgtggtggtggccctcgccggcgtgaacgaggatgacaagccgatggtcgccgtggccaccaacgaggccgcccgcaaggccggcatcaaggccggtgatctggtgcgcggcgcagccaaggtcctcggcggcggtggcggcggcaagccggacttcgcccagggtggcggtgtcgatgcctccaagatcgacgaggccctcgaagcgctcaagcacgaggcgcagaaagcctgattccgccggtggtgtggttaggcgttgatttgggtaatgcccgggtcggactggcactgtccgacccggagcttacctttgcacaccctgctggcaacattcatgttgccggcgactatttctttgctattgacgaggtcctgaacgtcatcgaagacgaacatgtggaccatgtaatcgtcggactgcccctgcagatggacggtacagaaggcaaaagcgccaaaaaagcgcgcaggtgggcggccaatctggagaagaggctgcaagcagagagtgaagacagtgattctacggagtatcagattccgcaggtatcattgatagatgagagattgacaacagtcagtgcgcatcgtcagctgttcgaggcccataaagcttcgaacaagcacaggccggtggttgaccagcagtcggcagtggtgattttgcagacggcactcgaccgtacccgggagcagtgaggtatcggttatgaccgatgattttaacgagttctttgatgacaacacgcattgggtcgaacaggggtcagaaccaatgcgcggggccgagccgccagaaccgccgaaatcccgcagggagatgcgcaagcgacgtgcacagcgcaggcgcaagcgtatcagtggcattatcatcgctatcgccatcgtcgccctgcttatcggcggcggctatttcggcgtaaccaagctcatcgcatggcgtgacagccggagcaaccagtcgacggccatcgcggactatccgggaccgggctatggcgaggtcgaattcaccgtgagcgagggccaaggcgcggcggagatcgccgataatctgctcaaggccgaagtcatcaagtctactgccgcgttcaccagcgtggtcaacgccaatagcacgacactctatccgggaacgttcacattgaagaagcatatggccgcatccaaagtgatcgacgttctctccgacaccaaccaggcggcgggcttcctcgaggttcgtcccggtgaacgtgccaccgatgtgttcgccaacgccgcgaagctttccggcattgcccaaagcgaattcgacacgattatcaagaacgagggtaaggatattctgcccaatgaagcgggcggtagctttgagggatggctggagccgggaacctacaacgtcaagagcatgaagagcgcttcggaaatcctcaaggccatggtcgataagcgtatcgccaagttggatgaattgggcgtgccggccggcagtgaccgcgaacaggtgatgatcatcgcctctatcgccgaggccgaggtcaacaaagccgattactacggcaaagtgacgcgagtcatcgagaaccgtttggagcagggcatgtcgttgggcatggattccaccgtggcctatggcaataacgtcaagcccgcgcaggtgaccaccgagatgacccaagacgagtccaacccgtacaacacgtacaagatctccggcctgccgcctacgccgatcagcaatcccggcgataacgccattcaagcggcactgcaccccgaaagcggcaattggctgtacttctgcacggtcaatctggacaccggcgaaaccaagttcgccgcaaccgccgatgaacatgaccagaacgtggccgaactacgcaagtggcaagccgaaaaccagtagtcatcccgttagcttccttcgcttggggaagctgatcggacgttagtctcttcattggctccctcgccgaggggagctgtccgcaaaagcggactgaggggagcactgcggggaatgtaacgctcaacttaagcccggggctcccgcgaagcggatggaagaaatctaggacaacaccccaacagccaccgccacaatcgcgcccgccaatatcaccggcacatacggcaccttgcccgcatgtgccggtgatgtgcgttgtgggtcgaatcgcgtccacaaggcaatccatgtgatgccggcaacgcccatcgccagccaccagaccaccacaggcaacaggccaaacagtccgacagacaatcccataggtatcaaggcggtcacatcgccgaatcccaatgaccgcggcaccagcaacgccaacgcgaactggatcaggcaacatagcacggtgaacaacagcgcctgcaacagcacgaacaggtcgttcaccaccactccatacgcgaaatcggcggccagctgaagcaacgcgcccgcagccacccacgcgatcggcacccgccgatgacgaacatcctcaatggacagtgcaagcccacatagcagaccgggtagcgtgaacaggtatggcatggcttaacattaacccctagctagacgtacacatagacgtacacacatgaaacgagggaagttatgctgcgttggcagacggcaggggagtctcacggagaagcattggtggccatgattgaagggttgccggccggcgtgcgtattagcacggacgatatcgtttccgcactggcacgccgtcgacttggatacggtcgcggtgcccgcatgaagttcgagcaagacaaggtccgtctgctgaccggtgtacgccacggcctgaccctcggctcgccggtggccatcgaaatcgccaacaccgaatggccgaagtggaccgaggtcatgagcgccgatgcactcgaccatgacctgccgcgcgaaggccgcaatgcgccgctgagccgcccgcgcccgggccacgccgatctgaccggcatgcgcaagtatggttttgacgacgcccgcccggtactggagcgctccagcgcccgtgagaccgcctcccgtgtggccttgggcgaggtggccaagcagttcctggatcaggcgttcggcatccgcaccgtagcccacgtggtggcgctcggtggcgtgcagaccaaccctgatttgccgttgcccacacctgacgatctggaagcgcttgacgcctcgcctgtccgtacgctggacaaagaggccgaagcccgcatcatcgaacgcatcaacgaggccaagaatgcctccgatacgttgggcggcgtgattgaagtgctggcttacggtgtgcctgccggcatcggcacgtatgtggagtccgaccgtcgactggacgcggctctggcctccgcgatcatgggcattcaggcgttcaagggtgtggagatcggcgacggcttcctggaagcctcccgccccggttcgcaggcgcatgatgagatcgtggtcaacgccgacggccgcatcgaccgtctgtccaaccgcgcaggcggcattgaaggcggtatgtccaatggccaggtgattcgcgtacgcggtgccatgaagccgattccgtccatccccaaggccctgcgtacggtcgacgtgctgaccggcgaatccgcacaagccatcaaccagcgttccgacagcaccgccgtgcctgcggcatccgtggtggccgaggccatggtgcgtctgactttggcgaagtacgcgctggataagttcggtggagacagtgttgccgaaacacggcgcaaccttgagtcgtatctcgcctcgtggccggagcacatgcgctgaacgaaaggcgtatggtttcgtgacgactgctgcggaaccatcagcaactgtactcaccaatcgtcgagaggattcgtagattatgaccgcacgcccccgcgccgtcatcatcggcatgatgggagccggcaaaacacgtgtcggtaaggaagtggcgcatatgttgcgtctgccgttcgccgatgccgatgtggagatcgaacgtgaagtgggcatgaagattccctcctacttcgaggaatacggtgagccggcattccgcgaggtcgaggccgatctcatcgccgatatgcttgaggatttcgacggtatcttttcgctgggcggtggcgctcccatgacgccatccacccagcatgccctcgcctcctacatcgaccatggcggtcgtgtggtctaccttgatgccgatccggcggaagccatggaacgcgcgaaccgtgggggaggccggcccatgctcaatggcaacgccaactcccgttggaaaaaactgttcaagcagcgtgacccagtattccgcgaggtcgctaacgttcatgtccatacccgggggcttacgcctcagggcgcagcgaagaaagtgattgatatggtatctgagcgagcagtgcatgttaccggagcggcaattgagccgtatgatgtggtcattggcgaaggtgccatgaaccatctggtcgacgtgctgggacccaaacccgccaaaatcgcgcttatccacactcagccggtgcagcgacactccgatcgtgcccgcgccctgttgcgtcagggcggctatgaggtttctgacatcgtgattccggatgccgaacccggcaagaccattaccgtggccaacggcatttgggaacgccttggcaacgaaggtttcacccgatccgatgccgtggtggggcttggcggcggtgccgcaaccgatttggccggtttcgtggctgccacgtggatgcgcggcgtgcgctatgtaaactgcccgacctcgctgctggccatggtcgatgcctccaccggtggcaaaaccggcatcaacaccccgcagggcaagaacctcgtcggctcgttctacacgcctgccggtgtgctggccgacaccaagacgctggctacgctgcccaatgacatcttcatcgagggtctcggcgaagtcgccaaatccggtttcatccgcgaccccgaaatcctgcatatcctcgaagaccacgcagctgaactgcgcgctttcgacggctctacattcctcggctcgccgctcgaagacgtggttgccgagctcattgagcgcacggtaaaggtcaaggcctaccacgtctcctccgatttgaaggagaagggtctgcgtgaattcctcaactacgggcacacgatgggtcatgccatcgaaaagctcgagcacttccgctggaggcatggcaatgcggtggccgtcggtatggtgtatgccgccgagctggcccatctgatcggttacatcgatcaggatctggttgactatcaccgctcgttgctcgcttcgctgggtctgccgacgtcgtggaatggcggctcgttcgacgacgtgctcgcattgatgcatcgcgacaagaaagcccgtggcaacgaactgcgcttcgtggtcctcgacgagattggtcacgtcgtacaccttgacaacccgcccgccgaagccgtagaagaagcattccgtcgtatccagcagtaattgaacggccgtaggccgtgccgttcgccatcccctcagaaaaaagtacttggctcccctctaacggaggtgccccggagtcggatttaccttctacctccctctgatgagggaggtgccccgaaggggcggagggagagaagcacaaacaaaaggagtcccaatgaccaaagtcatcgttgtcaatggccctaacctcggacgtctcggcgtccgccagcccgacgtctacggtcgtcaagacctcgacaccctgcgcaagctctgcgccgaatggggcaagggcctcggcctcgaagtcgaggtgcgccagaccgacgacgaagccgaaatggtgcactggatgcaccaagccgccgacgagaaaaccccggtggtcatgaaccccgccgccttcacgcactattcgtatgctctcgccgacgccgcgcacatggtcattgatgagaacctgccgcttatggaagtccatatttccaacccgtccgcccgcgacgagttccgcaagcgttccgtaatcagccctgtggccaccggtaccatcaccggcatgggtttctacggctacaagctcgcgctcgatgctgtggcgcacttgctgagtgaatagaaccaagccctccagccaatcccgggtagcagccgacgttgcgctgaccaactatttcctactccgtttcttcaaggaacacgaccaccgtttccgccaccgcgtacgtatactgttcggcggctccgaagagatcgcgctcaacgacatcaaatggttcgtcgccaacatcggcgcgccgtaccaggccatcgtcaccgatggtcccttcccggtgaacaatatccaaaaagggctgctcgatgtggatgtcgaactgccggtcgggccgcaattgcccaatggacaaaagactcatatggcaccggcttgggtatcgattgcgagaatgcggaaagcggaccgactaccgccaatggtggtttgattatgccggcgaatgagttcgctgaagcagacaaggtattaggcgcggtatcaggtgagacttctgaagatgccatcgtattgcacttcgacatccgttatgcggtaggccaggcacacgaacaaatcatcgagcgtattcaagcacaagccgaagcggcgggcggccgcattgtcgacatccttaacgatgacccatactacgtgcaggctgacgatccgcgtgtccagttgctcaccgcaacctacaacgacgtgctcggttgcgaggctcgacccgtggctgtcggcgacggcacccacgcccgctttatcccgcgcgcactcaacttcggtcccgaattccatgccgaccatgtgccggcggctgacggcatcgacctggagaccccgccattcatcgcaccaggtgccggcaacgcgcacggcgccgatgaatgggcctcgctgaaaaacctgaaaacagcgtttgttctatatgcgttaggcctagtgcgtctcgaccaatacctgcaatagctggcggataagacgtttgacgtgattatgaccttgcgtatgctttttggcgagcctactattcgtattgttcaagtacgccatgtcggggccgacgcgtctggcgaacacgccgagtcacacgcggatgatagagtgaaattccatggttagaagaacacatggtaattctcaagaacacgtcaccaagcatattttcgtcactggcggcgttgtttcctctctcggcaagggcctgaccgcatcttcgctcggtcgtttgctgcgcagccgcggtatccatgttctgcagcaaaagctcgatccgtacatcaacgtcgacccgggcaccatgaacccgttccagcatggtgaggtctacgtgaccgaagacggtgccgaaaccgatctcgacatcggccactacgagcgtttcctcgacgtcttcctgagccagaaggccaacgtcaccaccggtcagatctatcaggaagtgctgcgcaaggagcgcgccggcgaatacctcggccagtgcgtgcaggtcatcccgcacatcaccaacgaaatcaagtctcgtatgcgcgcccaggcttccgatgacgtggacgtgatcatcaccgaaatcggtggtaccgtcggcgacatcgagtcccagcccttccttgaggccgcccgcgaagtgcgccgcgatctcggcccggacaactgcatgttcgtgcacgtttccctggtgccgtacatttccgccgcccacgagctcaagaccaagcccacccagcactccgtgatgatgctgcgtcagctcggcatctccccggacgccctcgtgctgcgttccgaccgcccgctcaaccagtccatcaaagacaagatctccctgatgtgcgatgtcgatgccgaaggcgtggtcaactgcgtggatgcgccgagcatctacgatgtgccgaagatcctgttcgaggagggcctcgacgcctatgtggtgcgtgagctcggcctgccgttccatgacgtcgattgggacgaatgggccgacctgctggagcgtgtgcaccaccccaagcacgaggtcaacatcgccatcgtcggcaagtacatcgatctgccggacgcctacctgtctgtcaccgaggccatcaaggccggcggctttgccaactgggccaaggtcaacgtcaagtgggttgcggccgatcgttgcgaaaccaccgaaggtgcggccgccgctctcgacaacgtcgacggcatcgtgatccccggcggcttcggcatccgcggcatcgacggcaagatcggcgccctgaagttcgcccgtgaaaccaagctgcctgccctcggcctgtgcctgggcctgcagtccatggtcatcgaatactcccgccacgtgctgggcattgaagacgcgaactcttccgagttcgagcccgattgcgccaatccggtgatcgccaccatggaagagcagaaggacatcgtggccggcaagggcgacatgggccacaccatgcgtcttggctcctacccggctgagctggaggaaggctcgctggtcgccgaactgtacggcaccacgcatgtcaccgagcgtcaccgccaccgttacgaagtcaacgtggcctacaaggatcgtctgcgcgaaggcggcctgcgcatctccggccagagcccggacggcgagctcaccgagttcgtggaactgccgcaggacgtgcacccgttctatgtggccacccaggctcacccggagttcaagtctcgcccgaccaagccgcacccgctgttcgccggcctggtcaaggccgcgctcgaccatcaggcggcgcgctgacgcactttcgtgccgtgcataatatcgcggcatgatgtgctggctgccgtcatcggcgtagtgcaagacatacggtaaagacgtggtggcgaaatatctaatgatgtttcgccaccacgtcttttttgttgtatgagcagcatgcagcatgatgtattggaaggcgacggtaaaaaattaccgtttctatggtgtgttggtagtatgcagataacgcttagtaggccatcgcagaaagaccgaccatgaccgaacaccttgatgactcgacccagcagtttgcgcctctgtttggtgcgaataatgccgtcagcggcactgtggcagacagtgtggatgctgctgcatcagattccattcagggcgatgagatgaggaggcgccgcatctggccgtgggtggtgattgcttgtctgctggttgccttgggggctgcctgtggcggcggtgtttggttcttccaagatcacgtgctgcctggcacaacgctatggggaaattcagttaccggcaaaaccgagcaggagattgccgacctaatcaacgaacaggttgacaacaccgcggtacgagcgaaataccaggggcagtcggcgacgttcacgctgaaagatctcggcatcgaagttgatggtgaagcaatcgcatccgatgtcatcaatgcccaacgcggtgacgcatggtggcaacagtatgcgttctggattacgcatgatgtggccccgcaaatcaatcccgagctcgctgatggcagtgtggtagataaggcgctgaacattgatgcacaagaacctgttgacgcgcaagtcgcattgaacgataacaacagtggcttcaacgttattgcgggagaaaatggccagggagccaacgccaccagcattgcgaagcaagccatttccacagtggagtcattgggcagtgtccagccacagaccgttcgggtggaactcgacgtaaccgaaccgacgattaccaatgcaattgccgatgaggcgaaaaccacgctggaaaccctagtgaacaatgccgtggccatcaaggtggcggataaagacatcgccaccgtgaatgcgtccatgctgggttcggccatgcgcatcgacgccaaccagcagtcaaagctgaaagacaatgaagtacgtaatggctacgtggtctttgatgccgacaagctgcagcaatactatgacgagcaaatcaagccgaatctcaaattggaacgtgaagacaagaaggtcgtcgtcaataatgctggcgaagtgctgagcactgaaacagaaggccatgatggcattgtgattgccgatggcgcggatacggaggttggtgctcgcttggctcaggtgctggccacgggaactggctcagtgaatgtggacggcaaggtcgatcccaaacaggaagtcaaggtcgctcatcgcgtggtgattgacctgtccgaccgtaagctctatgcctatgagaatgacacggtggtcaagacattgaatgtcgtggtcgcggagggcaacgacaacgtcaccggcgaatgcgttggcatgatgtgtacgccgacaggtgacttcaacgtatggcaaaagttgcccagtcaagatatgagcggcacgctgaatcttgccgatggcacggtggaaacatgggatgtcaaagacgtgggcttcgtcaattacttctcctccggttgcgcaatccaccgtattgccggcggatatgtagcggatgccgtaatgccctccattgccaacggatctcatggttgcgtgggtatcggatgggatgtggccgaatggttctacaactggtgcaatatgggcacgagcgtgcatatccaagtgtgatatgcaacagtgtgatatgtaacaaatacggcatgcagtggtgcgacacataatgccgcatacgcgatgttcggtgtgcatgggacaagcttgcccggctccaatatcgctgtatcgcattcgtgtaatcaagcccacagccaatatgcgtcagggcggctagtgtttgcacttgggttctgctaggttttcataggattaagtgtgatacaaggaaggcaggatggtgaccgaaaacacagcaccaaacgccgccgctgacgtggagatgagccagtatgtggctgatcgtacccgcgtcaacgaggacaagatcaagaaggatgacgagatcatcagccagttcggcgactacaactatggttggcatgattctgatgccgccggcgaagccgcaaaacgaggcattgatgagaacgtcgtacgcgcaatcagcgccgacaaaggcgagccgcagtggatgctcgacatgcgtctgcgtggattcaaggcgttcctcgaaaagcccatgcccgattggggtgtggatctctccggcttcaacgcagacgacttcaagtactacgtcaagccaatcgacaagcaggcgaaaagctgggacgaactgcctgacgacatccgcaacacctacgatcgtctcggcatcccggaggcggagaagaaccgcctcgtctccggcgtggccgcccagtacgagtcggaggtcatctacaactccatccaggaggacctgaagaagcagggcgtcatcttcgtagacacggacaccgctgtgcgcgaataccctgaactcgtcaagaagtacttcggcaccgtcgtgcctccggaagacaacaagttcggtgccctcaacaccgcggcatggtccggcggctcgttcgtatacgtgccgaagggcgtgcatgtggacatcccgttgcaggcatacttccgcatcaacaccccggccatgggtcagttcgagcgcacgctcatcatcgcggacgaaggctcctacgtgcactacgtggaaggctgcaccgccccgatctggtccgaggactcgctgcacgccgccatcgtcgagatcatcgtcgaaaagcacgcccgcgtgcgttacaccaccgtgcagaactggtcgaacaacgtctacaacctcgtcacccagcgtgcctacgtgcgcgagggcggcacgatggaatgggtcgacggcaacatcggttccaaggccaccatgaagtacccggcctgcatcctcgccgaaccgtacgccaaggcatccaccatgtccctcggcttcgccggcaagggccagtaccaggacacgggcgcgaagatgattcacctcgccccgcacaccagctccaccatcgtcgccaagtccatttcccgtggtggtggccgctccgcctaccgcggtctggtcaaaatcgtcaagggcgcgtacggttcgtccaactcgaccgtgtgcgatgccctgctggtcgacgacttctcccgctccgatacctacccgcatgtcgacgttcgcgaagacgacgtttcgatggcccacgaagccaccgtttccaagatttccgaagaccagctcttctacctgatgagccgaggtctcacggaggaagaggcgcgaggcatgatcgtgcgcggcttcgtcgaaccgatcagccgtgagctgccgatggaatacgcgcttgaactcaacagacttgtggaacttcagatggaaggatcggtgggctgattccgatgaccgacaacacaacacccgtcaaggaaatcaagattccggtcgccgaccccaacgacccgtacgcgattccggccgctatgccgtcctccgtggaccatgccgtgcgctcgttcaacgcaggcgactacccggagcccagccgcaagcaggacgaatggcgctacacgcctatcgagcgcatcaacgagttcttcaccgtgttcaagccttccggcgaaacgcagatcgaagtctccatgattgacggctcgccgttggccgaaggcgtgaagctcagccagatcaagctcggtgagggcctgtccggcactgtgtccaagcccaacgaccgcgtctccgcagtcgaatgggaatccggccgcaccgcaaccattctggaactgtccggcgagatcgcccagcccgtgctcgtcaaggtgcacggcgcgggggaggacctcgacgctttccatctggtgatcgccgccgccgacaaggctcatgcggacgtcgtcgtggaacacgacggtgacgcacgactggccgaaggcgtggaaatcaccaccggcaaggactcgcacgtctccaccacgttcgttcaggaatgggccaaaactgccaagcatgtggccaaccaccgcatccacgtcggcgaaggcgcatccctgcgccactccgtcgtgaccttgggcggcgacatcgtccgcatccgcatggatcaggacttcggcggcgaacagggcgacctcaacatgctcggcatctacttcgtggaccccggcgagcacatcgaacaccgcacgatggtggtacacaaccacccggactgcaagtcccgcgtggtctacaagggcgcgcttgacggcaagggcgcgcactccacttgggtgggcaacgcgctcatccagcccaccgcccccggcaccgactcctacgagctcaaccgcaacctggtcctgaccccgggcgccatcgccgattccgagccgaacctcgaaatcgaaaacggcaacatcatcggtgccggtcacgcctcttcggtgggccgcttcgacgacgaggaactgttctacctcgaatcccgcggcattcccgaaaccgacgcccgcaagctcgtggtgcgcggcttcttcggcgaactcgtcgaggagatcggcattcccgccatctccgaacatctgatgacagtgattgaccgccgactggcccgtggtgaaaacgacgccatggcacaggtcctcgaagacaagtaagaacagcatttttaggagcacaacaatgtcaacactcgaaatcaaggacctgcacgtccacgtcgaaaccaaggaaggcatcaagccgatcctgaagggtgccaccctgaccgtccactccggtgaaacccacgccatcatgggccctaacggttccggcaagtccactctcgcctacacgttggccggccaccccaagtacgtggtcgactccggcgaggccctcctcgacggcaaggacatcctcaagatgactccggacgagcgcgccaaggccggcctgttcctggccatgcagtacccggtcgaaataccgggcgtgtccatgaccaacttcttgcgcactgccaagaccgaaatcgacggcgaggctcccggtattcgccagtgggccaaggacctgtccgcagccatgaagcgcctcaagatggacccgaagttcgcctcccgttccgtgaacgaaggcttctccggcggtgaaaagaagcgcgccgaagtgctgcagctcgaactgctgaagccgaagtttgccgtccttgacgaaaccgactccggcttggacgtggacgccctgcgcatcgtgtccgaaggtgtgaaccgcgccaaggaagccaaccagttcggcatcctcatggtcacgcactacacccgtatcttgaagtacatcaagccggacatcgtgcacgtgttcgccgacggccacttcgtcaagaccggcggccctgagctggccgacgaactcgaagagaacggctacgaccagtacctgcccgaaggcgccgactccgagtccgcactggcctgagtccgtgaccgtgggagtctgacatgccctattctcgacacgctccgggccgcttaggccaggtctttacggtcgcgaacaggccatgtcagactcccactcgtttcgtacaattgttacgtaagtagggggaacataatggttgattttaaggcaattcgggcgcagttcccgattctggatcaggagattcacgggcacccgctcgtgtacctggattctgcggccacctcgcagaagccgaatgcggtgatcgacgccgaggcgaacttctaccgtacaattaacgccggcgtgcaccgtggtgcgcacgagctggccgcccgtagcaccatggcctttgaggaggcccgagccaaggtggccaagctggtcggcgcgaatgcggccgaaggtgaagaggaggtcgtcgtcaccggtggtgccacggccggactgaacctgctcgccaccgcattcggcaatgcatcgctggggcgtgggggagaagccgccaagcgttttgccctgaagccgggcgatgagatcgtcgtctcgcgtgcggaacatcattcggtgctgctgccgttccaggagctgtcctaccgtaccggcgccaccttcaagtggatcgacctgaccgaggacggccgtgtgcgtacggacaacctcgacgaagtcatcaccgagcgtaccaaggtcgtggccgtcacccacgtgggcaacgccacgggtgccatcaccaacatcgccccgatcatcaagcgtgcgcatgaagtaggttcgatcttcatcttggacgcttgccagtccgtaccgcacctcaaggtcgatttccacgcgcttgatgtggacttcgccgtctggagcgcgcacaagatgtacggtcctaccggcgtcggtttcctgtatggtaagcgcgaactgctcgaagccctgcctccggccaacttcggcggctccatggtcgagctcgcctacatggaccacgaggcccaatacatggcccctccggcccgcttcgaggccggcacccagccggtcgcccaagtggtggccgcaggcgtcgccgccgaatggatgatgaacatcgggctcgagaacatcgaagcccatgagaagaccatcgccgccgaactgctcaagctcggcgacgtcgatggcattcgcatcctcgggccgcgcgaaaacgtggaccgcatcggcaccgtggcgttcgacgtggccggcgtgcatccgcacgatgtgggccagttcatcgacgcccagggcatcgcgattcgcgtgggacaccactgcgcccagccggtacaccgccacttcggcctatacgcatccaaccgtgcctcctccggtgtctacaattcggtcgaagatgcccaagcgttggtcgaagcggccaagggcatccgtaagttctttggagtggagtaaaacagaacaccatgaacgaattcggtatgagcggggatgacctcgaacagatgtaccaagaggtcatcctcgaggcgtcgaaacatccgcatggcaaggaatcctttgcgcccaacgcagcggtcgaacagtccgcggacgcagcggccaatgtcaccgtgcaagccagccacgaatactgcacgcccggtgaatcgcaccagttcaacccgacctgcggcgacgaggcgaccatccatgtcgaagtctccgatgacgaaccgcacaccatcaagcgattggtgtgggacggccacggctgctccatttcgcaggccagcctgtcggtgatggtcgatctggtggacggcaaaaccgttgatgaggccatggatctggaacagacattccacaagctgatggaatcgcgcggtgccggtctggacgacgagaacctggaagaaaagctcggcgacgccgtggtattccaaggcgtgtcgaaataccctatgcgcatcaaatgcgctctgctaggctgggaagggctgaaggactccatcgccaaagccctcgctgcaaagaactgaggaaatatgtccaacgataatttggttcccgaaccacagccgtccgttttcgatgccgtcaacggcgtcctgcaggacgaggaggccgctcgccgcgtgatggccaacccggccttggccaagggcttcccgaacggacgcccgatcgagcactctgctgcgtccggcgatgacacctgtgcgtgtggcggtcaccacggcaaatgcggttgccaggatgacgaacagtccgatggcagcgagattccgatcaaggcgattgacgatatcggccgcgccactgccgaagacgtgcgcgaggcactgcatcaggtgattgatccggagcttggcatcgacgtgatcgatttgggtctggtctacggcattgagatcgatgagctaggccgcgccattattacgatgacgctgaccacgccggcctgcccgctgaccgaccttatcgaggacgaatgcgcatccacgctggccggtctggtcgaggagttccgcatcgactggacgtgggatccgcgctggaccatggagcgcatcacgcccgaaggccgcgaccagctcgccgccctaggcttcagcttcgacaacatgccaaagtactgatagcgcttagtaagttccctcatcagagggagctctatacgagaaaagccccgcatgatgcggggcttttccatgtctggactggtcaatcagtcatcgacgatggtgttcttcgggacaaccgtgatgccatccggcgtgacggtgaagccacgggccagatcgtgctcggtatcgatgccgacagtggagttctcggtgagcaccacgttcttgtcaagaatcgccttgtacacgcgggcgcggcggttgatgactacaccgtcgaacagcacggaatcgacaatctgtgcccacgagtggatacgcacattgggggagagcacggagtggtgcacttcaccgccggagacgatcacaccgggggagacgatcgaatcggtggcgtggcccaaacggtcgcggccggcgtgcacgaacttggccggcggcaggttgccggacatcgtgtaaatcggccaatcctggttgtacaggttgaactcgggcacataggcgatcagatccatgtgcgcatcgtagaactgcttaatcgtaccgacgtcgcgccagtaagcgtgatcagtggccgtggagcccggaatctcgttcgagttgaagtcgtagacgccggcttcgttgcgggaagcgaagtacggggcgatgtcgccgcccatgtcgtgcttggtgtcggcagccttctcatcgagagccagagcctcgaacagggccttggtgttggcgacgtagttacccatggaggccagaatctggttcggattgtccggcagaccggtggtggtgggcggcttctcttggaagttcttgatcatgttcgggtgatcgggatcgacctcaatcacaccgaactggttcgattcctcgatgggctggcggataccggccacggtgaactcggcgccggactcgatgtgctgctgtaccatctgttcgaagtccatgcggtagacgtgatcggcacccacgatcaccacgatgtccggctggacatcctcgatgatgttgatggtctggtagatggcgtcggcggagccgagataccaatgcttgccgagacgctgctgcgcgggcacaggggagacgtacgagccaagcagcggggagaaacgccagacctgggagatgtggcggtcaagcgagtgagacttgtattgggtgagcaccacgacctgacggtacccggagttcaccaggttgctcaacgggaaatcgatcagacgatacacaccaccgaagggaacggcgggcttcgcgcgatcacgggttaacggcatcaggcgggtcccctcaccacctgcaagcacaatcgacagaatcttgggattcttggtcatcgtaactgtcctctctgttactgagcgtctttcgacaccgcactgccgggccggatgcttccttgcattcggtttacatagttaataattgcagaaaaaaacgaacatgcaaggctttcgcccccgcgtgccgtgaacttgcgatgaacagtttcgtagatttgttaaggatccggccttttcggagcgcgtgcgattccttagcgtgtcgcgtagaacgccactgcgctggatgccgccacgttcaggctatccacgccgtggctcatcggaatcttcacggtcaaatcggcgcgggcaatcgtatggtgggacaggccgtcgccctcggtaccgaagatcagcgcgagcttgtcgatatgcgtcggatcttcggcaggcgcgtgcagacggcgtgtcagttcgtccaacgaaatcgaacgatcctccaatgccatggccacggtggtgaagcccagcgacttcaactcgtcgatgccctggaacggccagtaatgcttgttttcggtgccgtcgtcgttgaacccggtgatacgggtccacggaatctggaatacggtgcccatcgacacgcgggcggcgcgtcggtacagcggatcaccgcaggagggtgtgaccagcacggcatccacatcgagcgcggccgccgaacgcatcagtgcgcccacattggtgtggtccacgatgttttccattactgccacgcggcgggcgctcctgcagacctcggctacggagggcagcggccagcgtcgcatcgcgcatagggctccgcgatgcaaacggtagccggtcagacgcttgagctgctcaggtgaggccacgtagacgggaatatccgcgccccagcgcccgtcgatgaagtcgaaggtgtctttcatgccctccagccaaggttcctcgaccagcagtgacagcggttcgcggtcagcggccagcgcgcggtcgataaccttgggggactcggcgatgaacacgcccttggctggttccaagcgattacgcaactgcatttcggtgaggctcacatacgcttcgacgcgcgggtcgtcgacggtgtccagcgtgatgaactgcattggtggcctttcgtgtgtgcagataacgaaaaaccccttgcaatgcaaggggtttatctgtgcccgagacgggacttgaacccgtacgcccgtataaaataggcactagcacctcaagctagcgcgtctaccattccgccacccgggcaggtgtcgtttggacaacgagtagatagcttagcatgaaattacagggatgcaattcgcgcgtgtgcccggcgtgtcgcgtgtagccttgaagtcatgactgatgccctttttcttttcgacccgcaggtcgacgacgtcccggtgaacagcgacgaactccacgccggctggaagctaaccctgcccgctcacatcaagcgccatgccgtgcaggccatgcgactcaaggcaggggacagcctgcaactttccgacggcaacggcttgagaatccaggcagtgatggccgatcctgaagccggactggctgaagtcgtggaagtggggcgcgaacccgagccgctcacccgtttggcgctgattcaggcattggcgaaaaccggccatgatgagcaggccatcgatatggctactcaaatcggcgtcgaccaagtggtgccatggcaggcggaccgatccattgccaagtggaaggtcggccgtacagacaagaagtggaattcggtactggatgccgccaccgagcagtcgcggcgcgcctttaagccgcaactggaggcgtgcgcgtccagcaaggaggtcgtggccatctgccgcagggcctgcgtgcatggcgatgtggtgattgtgctgcatcaggatgctaccgatacgtggtccggcgtggaggagaaggttgcgcagttggtggaacgcacgctccaggacggccggccgcggactgtcagtgtggtggtcgggcctgagggtggcatcagtgagcaggaggtagctgatttcgtcaaggccggagcggtgagctgcgtactggggcgcaatattctgagagccgcgacggccggtccggtggcgttgtcgctgttgtctcgggtgttgggacgttacgagtaacgcccacgcgctaagctggtgcgtagcaacatcaaaccaaggagcatgatgagcgaatccgacgattgcctgttctgcaagatcatcgcagggcagattcccagcagcaaggtctacgaggacgagacgacctacgcattcaacgacatcaatcccaaggccaaggtccacgtgctcgtggtgcccaagaagcactacgccaacgtcgccgaacttgccgccggtgacccgaccgagctggcccacatcgtctccatcgcgcagaacatcgccgacaaggaatttcacggcgcctatcgactggtgttcaacaccggtctcgacgccggccagaccgtcttccacgtgcacgcgcacgtgatgaccggcgaaaagctcgacgagtagtaggggaatatccgcttcgtggcaacgactacacgtaccatcaccatcccgccccaacttgaccccgtcgccgtgctcggcccggttgacgaggtcattcgcgaggtggagcgcgcctttccggacctgacgattatcgtgcgcggcaaccgcgtggcgatcgtctcccgctccaagcagaccgaagcccaagccgcacaggccgaggatttggtcaacaccatcatccaagccgcctacaccgcgcctatggacgccgacaccgtgcgtcgcatgctcgaccagaacgtgctcaagaaccacgtgcgcctcgaacatcccggtcacggcccggtgcgtgacaaactggcgcaatcgacctcaaacgaacgcgctcatgcacgttctgccggctcccacgacccgacgtaccgcaagcccacggttcccggcgtcatcacctttgctgccggcgtgccggtccgtgcgaaaaccgccggacaagtggcctacgtgaacgccatcgaatcgcacaccatcaccttcggcattggtcccgcaggcaccggcaagacgtatctggccgtggccaaggctgtgcgtgccttccaggacaagcagattcgccgcatcatcctcacgcgcccggccgtggaggccggcgaaagcctcggctttctgcccggcacgctgaacgacaaggttgacccgtatctgcgcccgctgtacgacgcgcttggcgacatgctcggcgccgaccagctcaagcggtacatggacgacggctccatcgaagtggcgccgctcgcctacatgcgcggccgtacgctgaacgacgcgttcgtgatcctcgacgaggctcagaacaccaccgaacagcagatgaagatgttcctgacccgtctgggcttcaacaccacgatggtcatcaccggcgatatctcgcaggtggacctgaccgtgccgcgctcgggactggccaccatcgaacgcatcctgggcggtatcaacgacatcgcattcgtgcatctcaaaaccgaggacgtggtacgtcaccagctggtcggacagatcgtggccgcctacgaccgtcactccgccatcgccggcgaccaccgcgacatcgaacgcaagggccgccgcaaccataccgacttcgatgcccgccagcaagcggattcaaccaaccaaagtgagacagacgatgagcgttgacgtcaccaatgaaacccagtgggtcatcgcccccaaggtcttctccgatttgggtatttgggtactcgaccagatgcgcgtgagcacccagtccgacctgaccatcatgttcgtggatcccgatcccatcgccgaactgcacatgcgttggatgaacctcgaaggcccgaccgacgtgatgagcttcccgatggacgagctgcgccccggcgacggcaaaaccgtgatggaaggagtgctcggcgacatcgtcatctgcccgtgggtcgccgcccaacaggctgccgcagccgggcacagcaccatgcaggagatgctattgctcaccattcacggcatcctgcacctgctcggctacgaccacgtgacccccgagcaggagcgccagatgttcggcctgcagcgacagctgctgctcaccttcttcgccctacgccacgatgtcaacgtgcaggccacgctgcccgccggcacgcccgacgcgctggccctgtacgacgccgtgcacggtgccggccgcgacctcgattccaaataagctcccaaatcaatcacaccaaatccggattattcgataccgttcaaggacattcaaggacaccgaaaaatcattatggagtattccagtaccacgccgatcgccatcaccgtcattctcgtactcgtggcggccctgttcgtctggctctcgctgaccatggccgccgctgaaggcgccgtggcccgcgtaacgcgagccagcctcaacaatctcatcctcgaggtgcagaccgactccgaagcaagccagttcctcaagatgaagaagatcgacaagattcatcgcgtgcaacggctcatcgccgaccgttacgccaccgccggcagctgtgcgttcttccgcatcgcctgcaatgtgctcgacggcgtactggtgtcttccatcgcatccctgtggggtgcggaactgtggattgaactgctctccggattcctgttcgcgattatcgtagccgtggtctccgtactggtccgcccgcgcaccgccggcatgaccaagccggtcgacatcatgatttccaactcgcgcatcgtgtcgttggccaccaagctcacgccgttcgcacgcatcggtggcgacaagtccggttccaaggggccgggccgccgctccaaggactccgatctgtccgacgacgaggagcttgagaagattcagctcgagcagggcaaggccgccatcgaccgactggtggagtccaacgacttcgatccggaagtctccgaaatgttgcgcaacgtgctcaccctgtctgatacgttgactcgcgagatcatggtgccgcgcaccgatatgatctgcatggagcgcgactccacactgtcttccgcgctgaaactgttctcccgctccggcttctcccgcgtgccggtgatcggtgaggatgtggatgacctgatcggcgtggcctatttgaaggacgccgtgcgtgccaccgccttcaacccggcggccatggagcgcgcggtcgaatccatcgtccggcagccgctgcttgttcccgaatccaagccggtggacgacctgttccatgagatgcagcgttcccgccagcatgtggccgtggtggtcgatgagtatggcggcatcgccggcatggtgactatcgaggatgccatcgaacagatcgtcggcgagctggaagacgagcacgaccgcacccagcgtactgagccggagaaaatcggagacaacaagtggaagatgcccgcccgtacgccgattgccgatctggaggagatcttcgagatcgacattgatgaggacgatgtcgataccgtgtacggcctgctgaccaagattctgggccgagtgccgattgtcggtgcctcggctgtgacgcgcggtctgcgactgaccgccgtggactccgccggacgccgcaagaaggtgtccaccatcgtcgtagaaccggcgcacgtcgagggcggcgaggaaaataacaagacccatgaggaaactgacggcgagcccgtcgaaggcgatgataccgccagcaaggagtgatatgaccgatcagaacaacagcacgaacgacgtcgatgacattgacgttaccgatgcttccgatgttgccggcgttgccgaagtcgacgcgaccggtgaaacggcgaacgtgaccaagcaggacgtgccgtatcgctccggattcgtggccgtggtcggccgcccgaacgtcggcaaatccacgttgatcaacgcgttgatcggcaagcagatcgccatcgcatcctctcgcccggaaaccacccgtaaggcgatccgcggcatcctgaccgccgaccacgcgcagctcgtgctcgtggacacgcccggtattcaccgtccgcgtacgttgctcggccagcgtctgaacgacgtggtcgacgaatctctggccgatgtggacgtggtggccttcctgctgcccgccgatcaggaaatcggccccggcgacaagcgtattctctcccgactgcgtaccgacttcgccaccaagcgtgaggacggtacgttcaagtggcgcatcccgctgattgccatcgtcaccaagatcgacgagcttggccgtcagcaactcatcaacaagctcatcgaaatcaacgatttcgccgatttctcggacatcgtgccggtgagcgctctgaagcacgacaatctggctgaagtgaagaacgtgctcattgagcacacgcccgagggtccgcagatgtacccggacgatcagatcagcgaggagcgtccggaagacaccatcgccgaactcgtgcgcggtgcgttccttgagaccctggacgacgagctgccgcattcgctggccgtggtggttgattccatcgactatccggaagacaacgagaccggtcagggctatgacggcaaggcgcaggtcaacgtgtccatttacgtggagcgtgactcccagaagccgatcatcatcggcaagggcgcctcgaacctcacctacgtcaagaagaagctgcgcaccccggtcaaccgcatcgtcggccaaaaagccaagctcgacctccacgtcaaggtagccaaaggctggcagtccgaccccaagcagctggagcgcctgggcttctaaggcgtatagacgaaaaaagctccctcgtcagagggagcttttgctatacggtttacttccgcttcgtgtacatctgggtgttgaggagggtggagtagcgcttgatgaccttgggacgaatcaccttcatggaagcggtcatcaggccgttttcctgagtgaactcctcgggcaggatgatgaacttgcgcacggactcggcgcgggagacgccctcgttggcctgatcgacccacttctgcacttcggcgcgcacggcggcgttcttggcggcatcctccagcggcatgttctcgtccaggcccttggcggccagccacgggcgcagcgactcctcgtccagcgtcaccaatgcggagatgaacggacgcttatcacccagcaccagcgcctgggagacgaactcgcaacgctgaatgacttcctcgatcgggccgggggagacgttcttaccacctgcagtgataatcagatccttcttacgaccggtgatgtacaggaagccatcgttgtcgatacggcccaagtcgccggtgacataccagccatcttcggtgaacgacagctcagtggcctcgtcgttcttgtgatagcgcgggaacacggcacgacccttgacctgaatttcgccgtcctcggcgatgcgcagggagaatccggggaatgcgatgcccacggaaccagcgtggaacggcgtacccagcgggttgaacgcgcacggtgcggtggtctcggtcagaccatagccctcgtatacaggcacacccgcgccacggaagaaagccagcagttccgggtcaagcggggcaccgccggccacaatccacttggcgcgaccgccgagcacttcgcgcagcgaagagtagacaatcggatcgaaggcagcgcggcgagtgcgggtcagtgcacccgccttgccattggtggagacttccttcatatagttctgcgcagccaccacggcggaggcgaacaccacgccctttggaccgtgtccggccttctgagatgcggcgttgtacaccttctccagcacacgcggcaccacgatcatgatggatggcctggccacctgcaggtcgctgatcagcgtcttgatgccggctgcgatatagatgtgcacgttcgaggccacgacgatgtagttgatggcgcgggcgaaggaatgggcctgcggcaggaacaacaggatggtgtttttcttgtcgtgcagcagttcgggcatgtaggtcggcagattcagcgcggtctggcagtagtgctcatgggtcatttccacgcccttcggcgcggccgtggaaccggaggtgtacacgatggagcacagatcggtcttcttgaccgagtcgatgcgctcgtccagctcttcgtccgagatgccggcgccataggccttgatttcgtccaagccaccggtctcgatggtgatgatgtgctccaaagacgggcattcctcgacggatccatccgccttctcgcgcatgtccgtatcctgcacgatcagcaggcgggcgtcggaattattgacgatgttgcgaatctgctcggccgaatcggtgtcgtagacggtggccagcacaccgccgcaggccatgatcgccgcgtcggtcaggtcccagtcgtaggaagtgcggcacatgaatgccacggcatcgcccttcttcaggccgtaatgaatcaggcccttggccacggcacgcacgtcagccaggaactcgttggcggtgacggtcacccaatcgttgccggacttgtaggtgtacagcggctcatcgcccatacgttcggcgcggtccgcatacaggtcgtagatggacgtaccttcgtccagcggcggattgccttcggtggaggtggtgagcaggccggtgacggggtcgatgtcggtgacggtcaggtggccgtcgtcccaatcgtcgctgtgaggcaaagcgatattggcctcgaccggcacgtcggcgttagacaggtaatcgggctcgtccggagtgtcgtcgtggaccgggtggacgaagtcggatcccaacctgagcgccttacgggtgagattgatagtgtgctgcgtgaaggaattgataaccgacaagtcttgctcctgtaaacctttcagtgtcgtccagccatgaggcgaacgcttctcaaagttcaaattgtaatcgcccaaaccgaactcgtcaccttacgcaaccgtaggattctggctggttaggggagtgcgtggcaaaatattgcacaggtcccgatattgttgagtaaccgtgagctgcgaaacggtgattgtcgataattattgagcggttggttgctaatcgatgccaggtgattgttggacggcttccgagcaattcatccgcaatgcacatggacacattcgtatttctcactaatttcgggttcgtttctgtttcgattggcggaatctcaagtcatggtctttaccttccggctacacttactatgcggataaccatgtccattttgaagcagaacaagaaagggctctcatggcgcaaaacccagaagccaccgtggtgttcggcgttttgaacgaaacgtccgaaacggaatcccgcgtcgcgctgacgccggatatcgtcacccggctgaagaggagcggtgtctcctcactgattgaagcaggtgccggcattgctgccgactacaccgatgaggattacgaaaaggccggtgcgaaggtgaccagccgtgacgaggtgctcgccgaagccgacgcgctcggttttgtggaccgaccgtccgccgagaccgtggccaagctcaaggccggccagtgggtcattggcatgctcggttccttcaccgatgccgattacgtggccgcgctcgagaaggccggtctggtgggcatcgccatcgaaaagctgccccgtaagctttccagcgcccagtccatggatgagatgacctctcagaactccgtgatgggctacaaggcagccatcaccgccgccgatgcttacggttccttcctgccgatgatgaccaccgccgccggcacgattcgcccggctaaggcgctggtgctcggtgccggcatcgccggcctgcaggccatcggtacgctgaagcgtcttggcgcggtcgtcaccgcgtacgacgtgcgtcccgcctcccagggcgaggtcgagtccctcggcgcgaagttccttgatctgggacttgacttctccaagggccagggcgagggcggttatgcccgcgcgctgagcgccgaagagcaggctcagcagcaggctgccgtcgacgaaaaggccgccggctttgacatcatcatcaccaccgccaaggtcccgggccgtaagcccccggtgctgctcaccgcagccggcgtcaagggtctcaagcgtggtgccgtgatcgtggactgcgcagcatccgacctcggcggcaacgtcgaaggctccgccgttggtgagcaggtcaccgagggcggtgtcaagctgatcggcgctccctacctggcctccggcgtcgccaccaccgcatccaacctgctttcgcgcaatgtggccgacatcctcgtgcacttcgtgcgtgacggcaagctcggccaggatctcaccgaagaactcgacgacgcgctggtggttgccggccgcgccgccgccccggcagctgctgccgatgccgagaagtccgagaagtaaggaagaaggaataccatgcctactctcgtcgtttccattaccctgttcgtcctcgcgctgctcatcggcatcgaggtcatcggcaaggtgcccgccaccctgcacacgccgcttatgtccggcgcgaactccatccacggcatcgtcatcgtcggcgttgtgatcgtggcagccgaagccaatagcccgctggcctacgtgttcatcttcctggccgctgtgctgggcaccatgaacgtcgttggtggctacgtggtcaccgaccgcatgcttgagatgttcaagtccagcaagaacgagaagaagggggagtcgaagtaatgacctccgcaaccgttggcgccatcgacatcgtcgcttggttcgtctacctgttctctgccgtcctgtttgtggtcggtctgcatttcatgaattcgccgaagaccgcccgcaagggtaaccagatctccgcgttcggcatggtcgtggccgtgctcatggcgttcatcgtgctcttcgccaagggcttcgtgaacattgtcgccgtggtggtgctggtcgtcggcatcctgatcggtgccgtggccggtgtcgtctccgccaagaaggtgaagatgaccgatatgccgcagctggtctccgtgttcaataccgtgggtggtggcgccgccgcactcgtggccctgaacgacatcctgaccaaggaaggcaccccggacatcgtggtgctcatcaccgctggtctcggtattctcatcggttctgtgaccttcaccggctcgctcatcgctgccggcaagctgcagggtatcaagtgggtcaagaagctgaacctgccgggcaagggcgtgtggaacattctgttcgccgtgctgtccgtcgcctcgctggtcatgctgtgcgtccagcctgaacagcgcctgctgtggtcgattctgaccaccgtgttcgccctgtgctacggcttggtgttcgtgattccgatcggcggcgccgatatgccggtggtgatctccgtgctcaacgcctgcaccggtacggctgtggctatgtccggtctggcgattgacaacgttgccctgatcgtggccggcgcactcgtcggttccgcaggtgtgaccctgtccatcctcatggctcaggccatgaaccgcccgctgctctccgtcttggccggtggcttcggcggtggtgctgacgccgctgctgctggcgacggtccggaaggcaccatgaaggagaccacgccggacgatctggccgttcagctcgtctacgcacagaaggtcatcttcgtgcccggcttcggtctggctcaggctcaggcccagcgcgagctcgccgacctcggcgaactgctcaagggccacggcgtggaagtctcctacgccattcacccggtcgcaggccgtatgcctggccacatgaacgtgctgctggccgaggccaacgtgccctacgaggagctcgtggatctcgatgagatcaacccgcagttcccgcaggccaacgtggctctggtcgtcggcgccaacgatgtgaccaacccggctgctcgccgtcccggcaccccggtctccggcatgccgattctcgacgtcgacaagtcccagaacgtcgtggtcatgaagcgcggccgcggtatgggctacgccggcatccagaacgagctctacttcgaagacaacacccagatgctgttcggcgacgcgaagaagagtctgcagtccgtcatcgccgccgtcaaggaattgctcgcgtaaccattcttggctcccctctgtgaggggagctgtcgaacggagtgagactgaggggagtagcccatacgcgggtgctcccctcagtcagcttcgctggcggctcccctcacagaggggagccaagctctatatctactacaacccaaacacccgcttaacaaagctgttaacgcgacgccaatagcgctccgggtcggtgctggcgctcatcgtgtgatcagcaccgggaatcagcagcttctcgcggtcgatgctggcgcaggcgttgtaattgatgtccagatacttcggattgacaaaagtatccgctccgccatgaatgaacatcatcggaatagtcgcgtgccgtaatgccttcacacaggaggcgtcctcaaaccggtatccagccttgcgttcagacacatgactggccactttgaccagcagcacggccaacggccttggtaaatggaacatcgcggcagcggtgtcggtaaactggccggccacagagccatagccgcaatcctcgatagcagcgatgacattgcgggggagtcgcgcatcgccggccgccatcatcaccgtggcggcgcccatcgaattgccatgcaacagaatgcgtgcatccggatcagctgcggtgatcagcgaaacccagcccaacagatcgtcgctttccagcaatcccatacccacgtaacgcccttcgctcaactcatgggcgcgctgcgcgggtagcaggaccgtaaaaccgagttgcgcatagcgatgcgcccatttggccatttccgcgggctctccggcatagccatggcagcagatcgcgtataggtgcggctgtgggtcggaacaatccgggtccaacagccagccgtggagtttcaatccatcatggctgcgcagcgtgaccgattgcttggcctcctcgaaccaccgggcggcctcaagctgctcggacatgtcgaattcgatgcctttcggcgtctcctcgtgcggcatgttgaacatcgaacgtttggccttggtgtccagcgcgaacgtgaacatgacgttggcggccgcggctgtgacgccggctcctgtggcggctatcgcggcaagtgccgcagccatacccctgacaacgcgagtgtgtgtggcgatgacgtcgtggccatcctcattgatgacgtcgtccgaacgagtcatatcaacctcccgatacggtactcaccatcgtacgttattttcgaaatcatccccaacttcgtgaaagaccgtacactgagtgtcgctgagcgtacgattttcacgaaatggcggacgatttcgtgaaaaccgtatgatgagaacgggtaagcgtacgttcttcacgaaatggcggacgatttcgcggaaaccgtacgttgagaacgggtaagcgtacgttcttcacaaagttagggattatttcgcggaaaccgtacgttgacgtggctgggacggccgggatgcagtgtcattgaagcatcaccacgccaaagtccggagttggcgtatacttgacaattgttgctttggcgagggaagtgtgcgtgctgacacatgacacagcttccgttatcgactcggcgtatttcactccttgtagggtgtctctcggcgcgtcgtggcgtctgagcgagacagtacgaaacgaaactacaaggagtatccattatggctaccaccattaagcttgagggcgaggcccgttccgagttcggcaagggcgttgctcgtcgtctgcgcgttgccaacaagattccggccaccatctacgccggcggcgaagagcccgccttcgtgaccttgccgatgcgcgagaccaccctggccctgcgtcacaccaacgccctgttcaccatcgccttcgacggcaacaccaagatggccgtcgtcaaggacgtgcagaagaacccggtcaagcgcatcatcgagcacgttgacttccttgaggtcaaggctggcgagaagatcgacgtcgaggtgccggtcttcgttgaaggcaccccgaagggcgctgctgtggcattcgtcgacattcaggagctcaaggttcgcgctgacgtcgccaacctgcctgagaagatcgttgtgagcgtcgagggcctaaccgatggcaccaaggtgttcgctaaggacgttgttctgcctgaaggcgttgagctcgacgttgaggacccggaagagtccgtcgtcaccgttgaggtgccggaagatgcttctgagtccaccgccgctccggaagctgctgctccggctgccgacgctgctgctccggctgccgacgccaagtgagtcgatctcttcgatagcgaacaattcagaacataactgaaacgtggaagcccgcagccgttgagaacggtgcgggcttcttcgtttttcaccatgtgaactctgccacacgagtaacacatgggtgtgcaaaagtatgcaacagagctcgcgccacaagcgcacagcacacaccccatatggtggctttcgggccgccaaagtcaagaagaagtagctagtaatgactgaaaacacgcaccacgatccggcagcgctcgacaagctcgccgaaccgttcaccgtactgccgaacgacaaccccgcatccgatgagaagcgtcagtccctcatcgacaagccggctttcggccaggtgttctccgacaacatgacccacatgacctggaccaagggcgaaggctggtccgaccgccgcgtcgaaccgtacgcgccgctcaagatggatccgggtgcttccgtgctgcactacgcacaggagtgcttcgagggcctcaaggcttaccgtcatgccgacggctccacctggctgttccgcccggatgcgaacgccgagcgtttccagaactccgccaagcgtctgtacctgcctgagctgccgattgacgacttcctcggttccgtggccgcgctggtcaagcgcgacgccaactgggtgccgtcccgccgcgagtacacgctgtacatgcgtccgttcatgttcgcttccgagccgttcctcggcgtgcgcgccccgcaggaggtcgactactgcgtgatcgcctccccgtccggcccgtacttcccgggcggcgtcaagccggtgagcatctgggttgaagacaagtggttccgcaccggccctggcggcactggtttcgccaagtgcggcggcaactacgccgcctccctgctcggcgagtacaagggtgttgagaacggctgcgagcaggtgtgcttcgtggacgccgccaccaagacctacctcgaagagctcggtggcatgaacatgatggccgtgcacaaggatggccacgtggagaccccgtccctgaccggtaacattctgccgggtgtgacccgtcgctctctgattcagctgctgcaggacaagggccacgatgtagtcgagaccatgattgccctcgaccagctgctcgaggacatcaagtccggcgaagtcaccgaggtgttcgcttgcggtaccgccgccatcatcaccccgatcggtcgcttcaagtccgagaagttcgatgtcaccgtcgccgacggcggctccggcaagctcacctgcgaactgcgcgacgagctgctcggcatccagctcggcgaagtcgaggacccgcacaactggatgtggaaggtgtgctgaaacgcccgctgattaggcattgagaccccttgcgaacatcaatgtttgcaaggggtttcgttgtatcttgggtaagatttccggtgtctaggaatgtcgttctccaacattctccaacaaacttgcgggttgagttgcggaacggtttcggcgtggcgaaaatcgacggtgattgctgatggaaaaatatccgcgaagcgcctttttatatatcctgtaataaaccccttttatatatatcttttatacgggtaacaagcattcccctgatttctaacacacgttaccgtgttggggttatgtctagtcctctgttgtggtaacataaaagaaagcccggaagtgctggaacacaaccgggcaataaatggaaaaccgtacacaataactcagttctccacagtcaatcttaacacgagcactgtggaaggaaagcgatggaactagtgggataccagaatgcagaactcgtgtataagctcgcggcccaaggcaagctgggcaggcccagcggagacgggctgctcacggatgatctcgccatgaacatgttgctgtacatggcgctccgaacctacagttggcccgcatctggaaaagctctggacaaggggctggcttgccggtactacactttgggcgattccgagatgatcaaggatatggggatgggcatagtccccaaccttaaggaacttcccgacgaggagaaacttcccacgatgaagaaacgctacaatacggcagtcacacgcttgaagagggcgagacgattccttgtggcgcaaggtctggtcaaacaattggaaaaaccgaaacttgtcagtcttggtcgcatcaatggcgggtatcttctactccttggggatgatagggagaaccgtgaggttgaagcctatgcgcgggaatgcttgggcctgagctcctgttaacgttgaacatataggatatcaggtcaataccgggaaggagaagtcatgaccctactgtggcaggatgcgcgccgcaaagcgcaagaaacccttgacaattactgggaccactcctatccggtcaagatcgtgagcatatgcaaggccatgggtgtcacgccctacaccggtgagcttcccgaaggtgtcagcggcatgatagtcaaggaacacagcagcgagccccgagcctacacggaacgcaccgaaccacagacaagacgcaggttcacgctcgcacacgaactggggcatttcgtggaacgagtcaccatagcgcaggacaacgatttcgctttcatggacaaacgttccgacgattacgacatccacgaattctacgcggacgagttcgccggtgcgctgctcatgcccgaacacgatttcatccagaaagtcaagaacgatgggatgatcgcggccgcagcatatttcggcgtctcgctggccgcggttcgaaaacgcatggaacggttgcgcaagcacggggccgacatctgacatggcggattatgacgacaccggtttcgacgctgtggaatcgccggacgcggacctagacgcggtatccggcatatcctccacggatgcgagcaagaccgtggctgcggcgaaagtggttgaggaaaacgatccgttggattcgcctcaagccaagcaatcgaatgatgtcgctgatgcggaccagttcgtgcgtatggcgcgatggcgtccgttcatgcacctgttccacgactgtgcgacctcgacgcatctggataagaataggggtgaaagaatgcgggtgttcgcgcgggagcatccattgttccttagagcatgtctgctaggagactacgttttcgtcgcggtctgcgctctgatagtcgcgcttgcattggcgtatgccttggcccgtgtggtcggtgttcctttgccgtgggcttgaacttggttttgaatacgcgaaaaccgcccctccgtccagcgttgctgctgggggaggggcggtgtttattcgcggcgactacttgccggccatgcgtaccgggttgtatgcgactccgaatcctgcggcgatgatgcctgcggcggtgctgatgaaaccgccgatttcgggggagccgaagctcatgaacccgagtccgatgaccgaggcgacgagcgtgaccacgtagatgacggtgcgcaccgtgtcattgaatacgggagtgtacggcgtggccgtatggtcgggaatattgggcgtgccggtttccgtggtttcttcgagttgggtgtccggcgtgttgtcggtcatgttttgctccgatcaaaaaaatggtggtgatgccgccatcaggggagtgacggcggcatcggttgaatctcagcggcaggttacaacgtcgcccacgtagtagacgttgatgttgccggagggtaccgtgcactgggagacgttgtacccgtgggaggtggcgaaatcccataccgtgtcgccccactggagggtcttggagaccccgttggacggcgcggtcgtggtggagccgccgccgtaggttacgacgtcgccaacgtagtagcggttgatgtcacccgagggcgtgtgccatgcggacaacggccaagcattgttggcgaccgcgagtccccagatggtttcgccccactgcatgacgtggctgatgccacccgtgttggcggggggagtgctcggctgcgcgggcgtggccggggctgtggaaccggtggggttggcgtacaaatcccactgccatgcctcgccacggaacaggttgagatcgatgggactccacgtgttgaccacgccggtgccactgtactgtcgcatggcttcgccgtatgcgccgatcatccacggggatgcctgatagccggtcggattcatgttcgcgtattgggcaatccacaaaccgtatttggcgcggatatcggacgggatggtgcccgccaccggggcggtgtacagcaatgggcgcacaccaccgctcaagcgttcgcattccgccatgaagcggcgtacccaatcccaattaccaaacgcgggattgtcgtccatttcccagtcgagcgccacgatgccgtgacgccaatagttgctggtgttgcggtagaagaactgggcttccgcctccgggttgccgcccatggcgtaatggtagaggccgaatttcttgccgctggcctgtgcctgggcgatcatgcggttggcgtccgtgttgacgccggacacgagacagttgttattgacctgtccggtgccccatgtggtgccgaccacgataaaatcggcctgcatgttgtacacgtccgcgccgcactgccagttggacatgtccacgccctgcatgtccgcgtgcgcggtagcaggaagcagcatcatgcacacggcggcggccagcgccgtggccttggcgagcaggcgcttccaccacggcttcggcttgtccttgttattgaccatatgtcccctttctcgggatgaatattgttttgtggcccacggtcgtgggtcaggattatcggggcccactcggggccgtcaatgaaaaggccccacacggtatggtgtggggctatgagtcagtcgattttgtagaggcggggagtgagcgtcatatcgacctcgcccgtggtgttgatgaaaatctggcattctaggagtccggccttcactggtcccggcccatagtgactaggccggaacacgtctatgcgtccgcttccgtcatcgggggtgagcacggcttgcacgccaaacagccatgaggtgctacccagcggccagtccgtgccttccatcgtgtacgtgcccgcctccaaatgcaccttacttatcaagttcgcccatgagctaacttctgtcttggtggagcctttgaaccggtacgtgcccggcgctggttccgtaaccacgacacccgggtcggtgcctaatgttttaggcaggccggtgacacgcggatacaggttcgctagttcataccccccccccttaaggcttgtgttgtcgggtttcatccaatcgtgtgcggtgtcaccggattcgagctggattcggaagtcgccgttcttcgcggtgggcgtggcctcagtacacaggatttcgaagcgcaggttgacggtgccggctggaattaccccggcattacccgtgttaatctgggcacccagttgaccacctttggcgtcaaggcatttgacgctgacggtcagaccgtcgatactggtgggcctgctcaatgtcacggcaccatgtaccgggcaggggaacgtccacgaaaggcccgcccactgccgtgaggcggtgccggtgacgtgcagtgaaccgtcgctgttgacggtggcagtcagcccgctgcccgacgcggggccataggacaacaggttaatggatttgacggtgaccggcacggttttcgtgatcgtgccggccttgaggttgagactggtcgaacccatcgcgcgaccggtgacttgtattgtgcccatatggggcctcctaactatgagaaaagccccacacgcgggcggggcttatgagagttttcgtaggaccggggtgatgtccgcgtccacggtggtgttcggtttcacggagacgatgcattgataatcgtcagccgcgggacattcgcccttcgataggctgacgttggtggagaacaaatcgacattggagcttgtggacttcaattcggcgaacacgatgccggtgctggtcgtgtgttccagcgtgtatgtgccggactccagactgatggtggacgacacgaccgcccacgaggtcgatgtgccggaagcgtgcaccgtctcgccgttgcgtgtgaacgttatcccgtttactgtctttggcaggtcgtcgggcagtttccacaggttcgcccacacgtggaccgggatgttcacgctttgggagcccgccgtgatagtgagagtggtttcaccggccgtaaggccggttacggccaccccccccctaaaggtttcgctcatggcgggttctagtgatcgttgcaacacctgacctaccgcaaggagggtcaggtgaccagaagccaccgaaacgaagaccgtggcggggaacaccgttggacgttcaacggcgtcgaatatccgacgaggaagctgatgtgcgaggcgagacgcgccgagtacgtgcgcctgctggacgaggaaggcatgaacttcacccaggccgcgcacgcggtcggcgtctcgaaacgcaccggcaaggcgtggcgcaacggcaggacgcgcgccacgggaaggaacgagaaacccctggtggactggtatcgttccaccatggacaaacccaagaccctccatccgcgatacctgagccaggaggagcgcatccagatcgcggaccgtctgcgtctgggcgattcgatccgcgccatcgcccgcctgctgggccgcgaccccggcacggtcagccgcgaggtcgagcgcaacaggaatcccgagtccggcggttacgagccttaccgcgcccagcagaaggccgcggaccggctcaaacgccccaaaccgcgcaaggcggccgagggcacgcgactgtgggacgagatcgccgccgggttgcgcaggcattggagcccggagcagatagccaaccggctgaggctggacttcccggataatggggatatgcacgcgagcgtcgagacgatctaccaggccatctacctgcaggccaggggcgaactcaagcaggagctgaaacgcgccatgaggcaggggcgaaccgcccgcagaccccaaggcggccaaggccgcaaaccccgtttccgcgaacccatggccatgatctcggagcgacccccggagatcgaggaccgggcggtcccgggccactgggagggcgatctcatcaccggcagccgcaacaaaagcgccatcggcacgctcgtcgagcgcaccaccaggttcacgatcctgctgcacctgcccgacgggcacgacgccgaacacgtccagcaggccatcatcgacaagatgcagcacctgcccaaactcctgcgcaacagcctgacctgggaccagggagcggaactcgccctgcacaaacggatcggcgcctcgctggacatggccgtctacttctgcgacccgcactccccgtggcagcgcggcaccaacgagaacaccaacgggctcctgcgccagtacttccccaaaggcaccgacctatccgtctacccggaggactacctcgacgcggtcgccgaggaactcaacgaccggccacgcaaaaccctcgggttcatgaaaccaagcgagaagatcatcgaactgctcgacgccgcgtgataacctcaacaaccgacaacgtgaccatggaaggccgctcaaacctcaggtgttgcaaccaccactagaatctgcccatgattactccttagtgattgttgcgatggtcttgtttccggtttcggccgtgaactcctgcgaggcggcggcgggtaggatacgcacgttgaggcgcttctcgtctcccgcacgcaaggtcagggcggtcacggtcgcgcccgactcgtccgtcacggtgatggactcgggagcgtaggcggaggcgatggacgcggcggcggaagtgaaaccgttgatggtggccgtcaccaatatggttccgccatgccgccacgtgagcgtgttgcccgaaaccgtggcggtggaagtgtccctgctcgcgaacgtcacgtccttggtggtcaacaaaccgccaacatgaccgtccgcgtaggtggccttggcacccagtttcagggtgccgttgaccgccagagacttgggcaacggcttgcccttgtcatccgtgatctcgatgctcacgaccgtgtctttgtcgagcggccatacgagtttgccgttatatagggcgttgtacgtgtggccgttcattaatggtttgccggttttatggccggcgtatagggctggcatggtcaggctcccttcacggccttcttggccttgggttccacagtggtgtcggtgtcgggttcctccgtggtaccttcaggggtgccggtggaaggcagtacggcggaagcgctctccgccttgtccttgaccgcctgcaccgtcgaatcgatggtggcgatagccgattcgcccttcgccgcaaccgcgttggcggtatcggccacggtctgcgaatcattggcgacggacgccgccgactctcgaacgttagacgcgagaacatccagatcggactgggtggcggtagccgaatccgccgaagaccgggcgctcagcatggcgctcctagccaacgcggcgttcgtctgagcatcggccgtgatggactccaacgtgctcatggcagcagcggccttggtgacactcgccgtctcattgaagataatcaaaacgtcagggtattgggcgctcaacgcctccgcctccgactgggtggcggcacggcgaaccttcaacagttgggagccggccatgtccttcggcacgaacgtgccggcgtccacctccacaaggtcggcatactcgaccgtacccgcattgttcggcacctccacgtaacgcgtgtacgcctgcggcgaatcagccagttccacgacctgccagacgaaagcgggcgtcgtaggcagcaggtcaaccgtcaactcaccgtcttcagacaggttcgcgtcgaacgaagccgcgataacaagattcttcgccgcgtcgaaatgacgacgcaccggacggaaccgcatcgtgccggtcacagggtccaagccgcccgtcttcggcttcctgatggaaatatggatttgggtcattactgttcctccttaatggattcgattgtttcgggggccacgtccgggcgaagctcgtccggcagcgatggcttgggatgacgtttcaaaaactcgggttccgtcacttcgcagaacgattgcagccaatggaacaggccacgcacataggccacgatcttgaaatacttgcgttgcacctcctccaaatgctggatttgggtctcctgaaaagcgacctgctcacgcaacgggtcgatgatgctttccgtgagaatcttcacggccttgtcggccgcgtcggcggtgatgccgtcgatatcggcctcggttttcctgctgttcgaccacgcgccgaccagtccgccgatgccgccaccgccgaggagcgcgagaatcaacgcgctccaaaactcggcgcttgaaaacaggtcatgaaaaggggacattcagtgtcctttcgaatatgggaaagccccacacgatatggtgtgaggctaagtcaactgactatcgtcaggcgttacgtattatgcttacaacaaacggcaaggcgggacacgtccacttcacgccatacgcaaccgcgcataacgcgaaacaccttcaacccctaacgatgcgtcacgccaacgcagactattaccagacgaatcattgccgacaatggaaaccgtgccccaatgaaacgtcgtgagcttcaccgtgtacgagccgtaaggcaaccgcacagaaccggaagcaacccacctcaacgtgccgccgttcttctgcggcgacgtggaacaccaatacgctttacgctcaccgttcgcgtccaagaagtcgaacgccatattgtattcgccggtaccgccgatcgcggccgcaacctcgcacaggataagccccccgcaagtaacagtcgcagtcttctcaagataaccactcttaggctcagtcccaggggtaccactccacgtgctcgaccactcaaacaagggggagcatccgcaccccggacgcgcaaggatgccggtgacgatggcgactttcgcgtaggtttccaccacgcacctgtcaccggctcgggctcccacacaatccgtggtcatctgcaatcccatgagcgtgccgccgctcatatccacgtcagcggtccaataccctcctgtgtcgtacaccgtgttgatggtgccgatgcgcgtgatggtggcttccgcccccacttgggagggcatgatttcggccagacgattgccggcccttatcaggttcgactgcatttatgccttcactgttgttggttcgcttggacgctggaaggtacgggcctcgcattcgatgggaataccggcctccaaagtgatattctgcgcgcgtatcgcaaacctgccggaaaccgagccggtcggatactccaagtccaccacgtcggtcagattcaaaggagcgtacacgtgcgtgaacgtgaccctgtgaatcacggattgttcggtgcgtagcagttccaacgccttgtccgaggcgagtttcctgccttgctcgtcggtagtcacctcgtcggggatgctggaatactcgtaggcgtgagccaccctgcggccacggctgacagtgctgaactccgaagccgggtcatcgtcaatcgcggtcgaaacgtattccttgtccgtgttgtagtaggtgaccttcaccacgttcgccacctcacgcaggtcgcgttcgtcggtcatggtggtgaggaacgtggcgttcgcgccctcctgaaacgtccatttcggctggcgtttgcccggctccacatacttctccaatatgacgcgcccgtactcgtcggttctcgcactggagtatccggccaaatccaagagatcgttcaccgcgtcaagcttggtgctgcccttgtccttgtccttatcggacctcaaaccgaacgtccaattatccttcagcgtgtaattgccgggattgtaggccgcgacctgaagcccgcatcccttgaggatgtcggcggcggcggtcacggccttcttgcccttgcctatcgttatcggcgactcgaacatgtcgtcatcgacttcttgcagcagcccgtacaaatccagttggctggaagattccttgccgttcacgctgcgcttggggatgttgggaaggaacgtgcccaacggcacacttgccgtggaaccgtcatgccacgtgcagtcggcccatatccgtagccggtcggtgcccaggtcggtcgccccctccacggtcagggaaccggattcgcagatattggtgtcctggttgcgttcgatgctgcccccggatatcacccaatccaaccgtccggtctccaaacccgtgttcctgttgactcgcatcacacggtaggcgaccttgaaaggcttgctccaatcactcataggacgggctcctcccatgtcaattgggtcaggtcggcggaatagctgatgttcttcttgtccgcgatgtcaacgctcacggactgttccgccttcacgtagacacgcaggccggaaggctcccgataccatgcgtaagggtatccgtcagccaacaagagtatccgcagccacaacgcttggtcccactcccatacgccggtgacgctcaccgtggaatccaactggtccaattcgtagctggaaggcagagcattcgccccgtcgccccgcgcgaaatgaaactcgctggtcgaatgggaacgcttatgagacaccgtgttgttatagccgagcaataacgtctgacccgcatccgtgccgaagttcaacactccgaacccggattcgatgcgcgcgtccaccatgcgtgcgatggtcgtgcccatagccgaatacgcgaccaccctgtaatggaagtcggtgttcaacgggggaatggggtccacggccaactgctggtccaacaggttcgaggcgataagcacctccgaaccgtcaggcatgacacggatgacggatgcactgaccgtctccgactggccttcctccggcacgccgaacgacacgatgaccaacgccgcgtaatcattgttcgactctatcgcggccatcggctcggccgggtccggccagtccacgtccctcacgacgctcgtgctggattccaagccggaaccgccgcgcaccacgagcgtgatggtcaacgtcgaattgttgttcggcagatactggcttgcgccgatgctcaggcttcgcgtggaaccgtccatcgtcttccggtatttctccacgccgtccgactggatgatgagcgtctgcgagctgacgcccgtatcgtccgccacggtccacgccacggtgaacggtgtcgccgtaatggtgccggaaggcttgttgatgctgatgttcggatatttcgcgaccgtgaaggtcacgtagttcgaccatgcgccccagtcggcgtggatgcccttggtgcgcacgcgaatcctatacgagccgcagcttttgggcgtgcgctgataactggtgttcgtggtctgctcttcgatgaccgtaacgtccgaggggtcggtgacctccacctgcgcggcggattgggcggaaccgtcaggatgattcggtttccaagcgaccgtcatcggctgattgacaacatacgcgccgttctgcgtcgggttcagaatcgtcggcgcggaaggggccacggccgtctggatagtgttgctgtacgtccagtcggagaagagcgtggtcttggagttgtcatcgccgtagacgggtcttcccactaacgccgcgtactggacttggcccgcaggagctgcggtgtcggtccacgtgacgttctggattccgtttatgtcgggaagccagccttcggccgtcgcaccgggggtgcctccggttatgtcggcccattcgccgccgttgaccctgcgccgcagtctgatgccatgcacgtaggatttcgacgcatccacggtcacgcgcacggactgttcggacagtttcaccgcgttcaccgccacgggggcggccggcgtcgtgtagatgtagcccgaggtcacatggtcggacactccgccaggattctgggccgcgacgcggaactggtatcgggcgttcgccttcaaccccgtgtacgaatagttcaaggcgtcccagttcaacgccttgaccagaccccacgcgccctgagcgccgccgttcaagccgacgcactggtctgcgtagatctgcttccaatattttcgcgccgcattatcatagttcgactgccacgcggccttcacgcttgaatcattgacccgcgtccatgatacgttcttcggcgggttcggtttcgcatacgtgatgccgggaaccgtgaggttcacatgcgcttccgaccgtcccggcaaaccatatgggatgttcaggaacgcgcggcaggagaacgtctgcgcggactcctgcttcgtgacggtcacctgctgggtgtgtaaatccacgtcgccgttgaaggaccggtagccgaagttcaccgtgttcgtgctcgtgctcacgccattgacccaagcgccaccggacacggcatcggacgccacccagcgcgacgggtcggtgcgacggtagatgatgtgcacgcctatgacggcctgcgtcgcgttctgcgagacgatatcggcttgtacgcagcaacgccagccgccgccgatgatattgccggcaccttcaaccatgacaaacctttcttgacgatgttaggaaacaggaggaaaccgttgcaagctgaaacaaactggcttgcaacggttctctgacggtcagcgcggacgcatgttgcgtttccgggtggcggaagcgacaagggtttccaccgcgtcggctatcctccggtcggaggactccacgccgttgatagtcaccgtgttgttcgtcgtgttccccgtattcgagggaagttcgacctttatcaccgggttgacttcgacattccacgagccgttcgccgtggatacgcggccactggtcgcatacgcctgagacttcctgcgagcgttcaacgcgaacgcggatggttgcatggctttctccacactgccgaccgcgttcaacgtgttcaggaaactcctgccatacacggcgtcaatcttcttgacggctgcggcgcgaagcaccatctcaccattggacagcatcgccggaatcgaatcagaagtggaagtaccgggaccatagatacgaccaccggtagcatgatggccacccccggatatcgtgtcgatgaaagccgtccatgtgcggctagcgattgaccgcagagtggatagcaggttcgacgcgacatccaaagcgttgcccatcgcattcaatgtcgtggaatgataggtgggcaccttgccgatcaggcttcgtgccgttccggcaaacgatggcgtattgccgagacctgtaaacatggacaaccactgctgaggaatattccgaaccgcattattggcgatgttggaaaacagcgtcgtattgccggaaccagtcaatatagactgccactgctgaggaatgctctcaacggcgttcttcgcgataccggatgggccactggtgccatcaagtccgaacagccacgaccaccattcatgagggacgctgaacacgttcgccttagcggactcggtgccctcgctggtgttatcgacggcgctgacgagaatattattctcagcgagcttttcaccatcggactccctataggaggcgagtttcacctgagcgtcatcatcgttggcgtcgatgttgaagctgacacccttggcggcgggaaccttattcttctccaagtcctttatcttgccggaagcgtggtcgatacagtcgagaatccactgtatctgctcgtcggtcaggttcagatagccgagctcgtccctgaccttctgcatgcgctcctcagcgttgccctcacctgagaacagccacttgtaggctttcttggacatgccgagagcaagaagattctccttgacctcgcctgtctcccagcgagcattgcccttcgcgttcaacagcaacgtgaggtccctctcggacaagtcgcctttcatcagctgctcaacaagactgagaacaccatccaacgtggtgaccactccagcttcacgtagctggataacgatctctttctcaccatcggtcagaccggatatgccctgcacgagcttatccaccgcatcttgggcgatttccgaatgagcggtaatcgtggtgcccacatcagagggaatcagaccaagcgaatcagcgtacctttcagcagcttcctcactcatgccagcggcctgagcctgctgcacgatggcctcacgcgcctcataaatggagtttgcggccttctgcgtgtactcctccacctgaccgttcttctcaccataggagagaagctgttgggcggacagcaacgcggtagcggccacatccttcatcgccttgtcggtgcgcttgtaggcggcgttgttggcgtcagccagttcgccgttttccttgaacgcctgaccgttcgccttgaccgtcgtggcgagcgagctgagcttgtcggacagcgcggaggaggaatcggagatctgttcgagggaacgcagatatttcatctgctccttgacggatttctccaagccttccttgtgctgcttcttcaacgcctgcaacagcgtgtcggcggcgatggcggcatcggtctgcttctcgaccatcatgccgtactggtcgctggccttgtatgtctccttgctttgcgcctccaactgtttgacgagcttcttgtagccggcctcgttgccgctgaccgcatcggtcagcgtactggtgttgatgcccagacgtttggccgcgtcggctgcggacgtgtagccgccgttgagcttgacgagccattcagtgaccgcgccgccaccgtccttgccgaacaggagcgacgggtcatcccactgtttcgtggtctccgacttgaaatcgttgaacgcgtccgccgcctccttggcgttggacttgatgcccttcatgccgtcgatgaccttgtccatcgcctgcttggatgcttccgccttcgtcgtgtagtcggatatcgcattaccgatgacggcgatgcccgcgctgattcccagaccggcaaccgtcgtccagccgccgaacgcatcccacaggttcttcacgccggtcttcaacgaaccgaacctgccggactgctgttcggcctgctccccggccgaacggatggaggcgatggcctgaccgttcgcaccgaccaagccgcccatgtccttggaagtctccttggcagcgttccccggaaggagcagcttcttcgagttagcttccgccgccatgccgagggaattgacctcgctgatggcaccggacagaatgcccgcataattgccggaacgcaactggttcatcgccttaatcagggtgcccattttcacggacgcctgttcggcgctcaaacccagttcgctgagcatcttctggtatcgcatcgtggactggatgttctgcaacatgccggtcttcaacgactcgaacgccgtcttgcccgcacgaccgaacgtggcccacaatgtgatgatgcttttcaccggacccggcaacgagtcgaacgcttgggccacgccggtggcacccttggcgatggtgctgataagcgggctcacggtacgcaaagcggacgcgaacgtgccgccgaacgtgcgcgacaactggcccaccatgctcgccaaatcggagaacatggggcccgcgtcacccaccgcgtcgaacacttggctgaacccgtcgcggacgccggaactgaagtcgcggattccaccaccggactgctgcaacacgcggctcaacccggtgatgccctcgcctacgatctggcccgcgtcaccgaacaccgcgcgagtggtgtccttcaacgagtacgcggcgtcgccaatatccttgaaagcgttgcgcatcttgtcctgagcgtcctgcgcaccggcgctccaagcctccaaagtctcttggaacttgatggtgtgaacggccttgttggctttcgccaaagcctcggaaaacccttggatgccgttctcggtcttcgccagagtacccaacgtgccctcaagcacgcctataaggtcgaacacggacgatttcagatagccgccctgttcgatggccttttccatcgccttagtgacctgaccggtacgttcggcggtatccacccagttcgcccacttctcggccacgtcggaaatgtaggaggccatgcggggcagatactggctggactggtcgctcaagccgaggaacgcgcgggccagtgactgcaagcccggattcagttcggacaccgcgagacgagtgttctcgaagatacgcggtagttggtcggcttcgttcgactggcgcaccacgtcgataagcccgttgagcaccttgccttcctcgacggcgataccgttcaaacccttggacagtgagggggccacgtcgttggcgagacggtacaggttatccccatactcgttccaagcgttgtcgcccaactccttgttcaggttcgccagcgaggttttggcgacatcgaacttgtccttcaaatcaccgaacacccggtagcccacgtagcctgcggacgccagacccgccaacgcggcgggagcggccaacgcggccttcgtcatggacacgaggctggcaccgacaccgcccgcagtgcgtcccaggttcaggagtccggcacccaacgcggtgacgccggcaccgagaatcgaccacttgggaaccaccttgtcgagcttgtcgaacgtgttcaccagactgtcgaactggttctgcacgcccttcaaaccggtggcaccactggtcatgccggtgaaaatcttgccgaggtcagtgcccttgaaattggcgaagatgtcgatggtgcgggggcgggtgaagtaggcgagatgggctcgggccaacgcggtctccaagtccacgtccatcttcagctcgtcgttcttgtcctcgaatttcttcagcttctcctcggcgcgatgcatttgcaggtcgaggtcggcttccaactcccagcgacgttcgggattggctttgattttcgcggcggtttcacgcatcgacgcgatgatttgttcctgattgacctgccagtcaacgggaatgtcgaggcgcgtatgacgcagcttcttcaaccgggcttcgagcttgtcggcgttgttctcccacaccttgacgcggacgttgacctcatgctcccggtcgagtttggcgcgcagcttctccgcgtcatacatcagttccgcgtattttctgtcccattgggtcttagacaatgcgactttggcggtgatcggcttgcgggatgcgaagtcgcgcagcttcttcagctggtcgaaggtgttgttgagttccttgccgaggttcttgtcgatgcccatgggcttgaacttctggaacgcggcggaaagcgccttgacctgggtctcctgctcgtcgaacaggctggtcagctcccgggcggtcttgcgctgcttgtccatcgtgcggcgtgaatcgttctgcaccgcgttgaggcgtttgacgctggttcccgtgtcaccgaacacctcggccaacgccttctggccagccgtgagcttcggcaactgctgaagctgcctacggttcagcttctcggacttctcctcaaggtcgagaatcttgttcagaccggagaacagccggtcgttctcacggttgaagtcatgaagtcgagccttgcgcatgagctcggcgtccgaatacttggagatggcgtcggtcgccttctcccacttcttggtgttggagtcgataagacgctgctgtgccgctaccttattgtcgaaatcggtggagaagagcttgtcctgcgccttcttgttctccgctatctccttgcctaccgccttcaggtcggccttcaggcccttgagctgttcgcgcagttcggggatgcgactgttcttgtaccagttcgcggtgtcgatgtccccggcctcgcgcagctccttcatcttcttgatggaccagtcaagggtcttactgacatcggcttggctgcgggtcaactgctcctgacgtttgcgcccgttctcgatggcctccgcgtacatgtcgtaggcggcgtgctcgtccttgatgagcacggtctgcctgcgggatgcggccgtggcctccttgtcgtagagggcgcgttccaaccgcatacgggagagactgtcctgaagactgtcggccacggattcctgcgacttcttgacgaacgcctccgtccggcctacagtccgcttgatctggttggaaagccggtgaatcttctcattgaacgacgtatcgtccaagtcgaacctgctggtgaccggtttcttcgcccactgctcacgttgcgcccgaatcgccttgtcgatggcacgcaagccggacgggtcgccatcgatcttcaccacgttggtgagggtcttgccgtcaaggtcgcgcatctgctccttggcgcgtacgacgcccttcgtgttcacatcaacggtgacctcagggtggcgagaatgcagttccgcgttgagaatcttccagaaattatcggtgtccgggcgaatatcgacgccgaccgcgccagcggaatacaaggccatgagaaaacctccgggaggataaacgaaaacccctcgtggaatgcgaggggttttctgttaaaaactgttgccaccgaacacggcacccaacatgcccgtgatctgggcgaacgacttgcccgccgtggtgaacgacttcgacgccatcgaatcgggcttgtccaccactccgggcgggttgatgggacggggcttaatcttcttgtcgcccatcatccgggcgagcatcaccctgagcacgtcaagcgtgttcgccatgtcaagcatgagcatctgcgactgcccgtaggtgacataggagagccgtggcgtctccttggaatcggacgccggcaaaggatgatgctccatcatgtacgcgcggtacaggcttccgtcaacgccttccaacccgtccaacagggcgcacagccatacgggttcgtccaccttcatacgggccgggagattcaggttgtagaagcgttggaaatcggagcagaccgctactcggctttcgtcaagcgcgtcttggagccgcttgattttcccagtgccaatgcgtagaacgaggtcagggagaccagcagcacgaacaggtcctccaaggtgcggcccttcgtgaactccacccactgcttctcgtccacggcgatgtcacgatagaacatgtcggcgtactgggcgatctcggccatgagcacaacggcctcgtcctcgtcgcgcttctccttggttttcttcttgcccttgtcggcggtctcgtcatcgaagacgcccgtgtcgaacagtctggtctggcgttcgctgacgcgctgccacgtcacacggaactcggcggactgcgccacattcaattcctgcggcttcaccatgtcgggaagctcctcgaacaggggaagactcttcaattcatcccaagtctccggggtcttgttctcggtggtttcaatgttctctgccatcatcggctcctatccataaagtgtgaaaatggtccctatccgaaaaaagaggaatatccttgccgcgcggataggtacgcggcaaggaagaatccaggtcaggcggcggcagcgaaatcagccgggctgaggtaggctgcggacgtgaacttcttggccgcgtcacgcggaagcgcgctggaggtcttgatgttcgcctgagcggagaactccacgaacgaatccgtggaaagagcaggcagactggagaacgcgatatccgtgttcggcagcagcaggccagcacgcgagttgatgttcgtgtcagaccagagaatgaacaacgccttgttgataggcgtcttctccagactgaacgccacgccgacatcaggcatgtcaaccgcgttgtagaaggtcttgaacgtgcccttgtcgccctgcaccgaattgaacgtcacagtgccggtggtctggtcgtactgggtgcggaaggcgttcttaagccacgtggaaagcgtggtggcgtcgccgccgtccaacgcgaactcgggcaggttgtcgttcgacatgtggccgaggttcgtccacatgccgtcgcccacgcccacggtcgccgtctcgacggtgaactgcttgagcagtgcggaggtaatggtcgtatcggccttcgccatgaagatcgctcctcggacggcggtcaatacgccgtcgtcgtggatgccgatttcgtcagccatatcgttttcctttcaaatatggaaaaccccgcagccgtgcaggcgtgcggggtctgattgtgtgattgatggttttcagataaggtcagccgcgtggggacgcggcctgtatgcgtttcgtggaagtccacgcgacgatgcttttggaactggtcatgtcgccggaagaccgggactcgaaaccggggttgtccactatccgcccgattttcccgtacatggttcccggctggtacggccatgcggatatgcaacggtgcagccatccgcagatgcgggccacccgttccgggtcacggcccaacaccgtcaaagacagcgtgtactgccatatccaagccttcagattccagtcgggctgctcaggagcaccgcaatggtagagaatcacgtcatgggacaacaggagcgaatccgtggcgggcgtgacctccggttggatgaccggcctgaaatcacggttcttccattcgacagcgtccaggtaggcgcgtgtcatggcgaccgcatccaactgttcccttacggaaaggtcaaatatcgtggggtcagacatatttcgcctccgacatgatgaacaatcccggcatccaagcactcggacttttgatgccgtacttgtgttccagccaccggttgaagtagccgaactccaagtgggaggcgatctcggaaccgtcacggcccttgacgctcatgatcacggcggtatgcgtgccatgcgcgtgagtgctgatgtcgatgcggttggcgacggacgaatgcttcgctttcgcgtcggccagcgccttggctttcacctcgaccttctccgccacgggacgtgtcgcttcggctccgaacagtatcgccatgtcacggttcaacaccctcgcgggcttcagtttcacgtaccccatgtgcggctcccctcgggcgggacaggcggtttcaacccgttgtcctcggtcgcatggccgatgcatctcgcggtgatgttccaatggtgggcggcatccgaggcgtgacgcatctccataggcgggccgtcaacctcataacaggcgttatcgaaccagaactgcgtgttgatgtccccatgccattccggcgcgagaacgatcgccaacgcatcctcacgcaggccacctgtcgattgcggcgtggtatcctgcgcccagttcttcgaaaacgtgctgttcttattgattcgaggctcgaacgagcagtaacagtaggaggcgtccccatccggcaccgtgccggcaccgtagggtgtctcatacggtttcatcggctgcaccacgatcatgtcgcggtgcagaagatcatccgtgatgcggggttctgtctccacgtcatcgaacaggtgggtctcctcgggctgctccccgtcatacaggtggctcatggtcagcccccgaagccggggtcgaagccgaggctgatgtgcccgccgccctgcgaactggtgtagccggtgagtatggccttttcgtcctttgcgacgaacaatcggggactgggattgtagcccggagtcaccggctggtcatcgcgccgcgtgtacgagtagttaccgttcgattcggccttgtacttgtattggcgggcgagacggagaaccatatcgcataccacgccagcgaagtccgattcgctcagacgccgcctgcgcagccgcgcgtacacgttcgggcattcggccatgcacagcaatgcggccttacggcactgctgcttcacccacgaatcggggaaaccggtgtccttgtcgaacagttccggctccccggtcgcgttgagccgcatgtacttcaaccagtcgatgttgtcgataagcgtcgtggacatgctggctccttaagctcagccgttgaggacggtagccttgaacgtgctgttggactggacgagaaccggcagcatcgtgccgttcacgtaagcctcgtagcccggcgtggcggacgggatgtcgagaatggctccaatcgggccggcgtcgtactggcggctgatgccgtacacggtggactgcttggcttcggcggtcgggccgagagccgtgtagccgaggccggtgtcgttcaggccgggcagcagcagaacggtgttctccgggaagaaggaggccacgccgcccggcagaatgatcttctgctggcgggcgaactcctcatacgtctcatcaacgagcagaacgtcgctgatattcgcataggaggaaagaacgccacgcacctgggcttcgccgatgaaggcgggcagcatgtccgactgggcctgacccgcgtagaagtacttcatcacggcggcgttctccatgagcgtgttcatgaccttgcgggtcgtgaccatgacgcgcgggcgggtgccctcggccttgtacacgaggtcgctccatttgcgcaggtccttgatcgggtcgcttgcagcgttggaccacaggttgttggccttgagttcgacggcgagcgaggcgtctcgcgcgtaatcccagttggcggtcaggttcgactcgccgatgccgagcttggcgtccacggcgacggcgacgttggccttctccgtacggtaggccatttcggtgccgaggcgggcaagtgcctcacgcagctcgtcggaagcctcggtggcggtggcggcgacacgtccggctgcgatgtcgtgctcgctgatgcggtggcgcttgcgcagcggcagcatctccgtataggatttcttgccgccaccggtggtcttgtcatacggggcttcgctatcccatgtcgaatacttcatttcctcgacctcgaagcgcggctggttcggaacccagctcacgttcagaccggtcgggttcatcacatccggcagaatcttgccgaacggcagaatctcgcgcgtggactgatatgcgccgagcacgatggccgacgcctcggcgggcgtgatgatgtccttgttgataagggccatgatgttcctttcggatataaaaacccgccacatggggcgggtttcagaaacgaatgattaaggtcacttagcggccatgacgccggcagtgcgcagattggcgaacagggtgttgaccgcagtgacgatggcggcggcgtcggcactggttgcgaggttggcgacgttcgcggcctgcttgacgccacccagtgcgcttgcagtggcgttgggcagtttgtaggccggagcggtgccggcagcggacggggacagcaccgtcacatcgccgccagcgtccttgtcgtagtcgagaataaggccctcgaaaacggtgctttccgccagtgtgaccggcaggttgttgcggtcgatgacggccatgtagcgcacgccagcggtcggatactggtcctcgaagccggagcgcgtgaacaccacgtgcagctggctttcaaggaaaccggcgaccttgagctggcggccatcggtggcggtcgggtcatacgggccgaacaggccggtgctggtgaccttggcgaccggaatgccggacttcagccaggcgttgaaatcatccgggtcgatggaggcgaagtacttctgttccttctccttgtcgccggtgaacaggctcaggtcaagctgcgcctcacgaatgccatcggtgatgcggttgataagccaggactggtcgtcctgcggcaccgtatagccggtggtgtgaaccatttccacgggtttagccattggggttctccttactttttgtcgttgttgatggacgcgaacttgcgcccgtaatcgtatgcggcagtcaatccgccactggccggcgaaccttgaggatgaggcgccgtatggctgtatccctccaatacggaggcgggcaggggctgctgctgttcttctttcttcccctcgtcggcaaccgtttcggtctgcgcgggaagaatgaactgggatgcgttcttcgcccactcctcgatggcctcggcgtccgcgtccttgggtgcaagggcggcgaacacctcatcggtgagctgcgggtatgcggcctgcgccttgagcttggcgatctgggtctgagcctgcgcgtactggtgctccacgtcggccagcttgctttccgcatcggtggcgcgcttcaggttcgcgtggctcttcttctcgttctcgcggctcatggcctgccacatggacaccttgtcggcaaggtcgttgctgtcggccttaggcgtggtgtcgttctgttcgcccgttccgggctcaccgtccacggtcgttttgacgatgggggtgttttcgttgtcagccatcagggatggttcctttcgacttggttgctgttacgcggcaaggcgaagcctcgccctgagttgttgcgcgaacgcaaggtttgacgccagcgcctgtttcaggtgcggcgaaggttcgaaatggtaggtgtgctcctcgtagcggaagtgttcggcctttccggtcgattcgaccttccggtagtatgcggtgaacacgttggctctctccaacattcgttgaatctgctcccgtgtcatatccgcgtcgggctgatgccagtccacgtccttgcggggcttgacatccttggcgctcaatacggggcctatctcgctgttggtgagggtaagcacgcgggtctgccggagtttcgcggatgcggtgccacccgcctccttgtagatgcgtttcaggtcatcgtcgttgagtctcagaccggggtcgttgtctccgacgatggggagcacggtgcaatggcagttgccgtgcaaaggcatgagcgcggctatcgaatacaccctgtcggctgcgaccacgcacaagccgcacgtgcccgtcttggacagttccgggtggatgatgcgccggtatctcgtgacgccggacttacggtatcgttccaacgtggcatgggttccggcgatcatggaatcagtgtcgatgatgtcgataagacgctcgttcgcctcttccagccacctgtcaacggaacgctgcgcgtcggcctcaaggttctcccacgcggacgggcgcaagtgaggctccttactggaagcgtccctgtaggattccacggggcggagcatcatcttccacgggtccgtgttgtccctgaccacctcgaactccgggagctgaccctgcgcggtgacgccgacaagtccgagcgcgatgtcggcataggctatgccaagtcggcgcatacgctccacgaacgccatataccgtgaggtcaggttagccgacgcgccctgcgtgatggcatcgttccaccagtcggcgggggacaggctctgccacatcttccatgcggcggtcacgtattcctcgaccagtcgggcgcgttcgcgctcgtaccggctcatgcgctggttgagaatctgggtgatgtcggccatcagaacgtctccacgccgtcgagactggtgacgctatcggaaacgccgtcgccgttctcgtcgccgttcaaaccgttaacggcggactgggtggtttcatcccatccggtcgccggctgcacggcgccctgcagtacgggctgaccggccgattggtcggagaatgtcaactggtcggacatgcgattcatgtcatcctcggctatatcctgagctgtgaaaccgaagtcatgggtgagaaccgtgcggcgggccatcagaccggactggtatttcagctggccggattgggcgagttccagactgctcgtggacaccatgggcttccacatcagctcgaaatcgtcctcggcggcgctgccctcgccgttcaacgtcaacgccatgcgaatcatgcgtccgatggcctcggacgcgagggcgttcaggttctcgaccttgaaccgcagcgtctcgcgcttcaactcggcaccgttggcggaaccctgcacgtcagggctgagaatatccaacgggatgccggcagtggccgcaagatgcttgatgtcggcgttgatgacgttctgcaagccattcagatcggtggtctgagactcccatatatccacgccgtccggcaggttccatagtgctgcgggacccatggcgaacctttcagaaaggtcgattgggtcaccctcatccttcaagccctgaatgacctcgatatcctcagggccgtattcaaggttgatgtcgcctttgatggcgcgttggcggaacgcctgcatcatggttatgcacaggcggtcaaaaatctgacggtcgatacggcgcagagtatcaagaaaaggctcgaacatgcccatgccgtccggcgttggcagtttgaccaccggaaggctttcgcaggctagagcgtaatcgtaggtctcatcgccctgtgcccactcccaagtgttgcccggctcccatgccttgccttctatggcgagctgtgccacggcctcgtcatcgtcggggtcagtcaccgtgcgttcgctctcgcgcgtggcgagcttggaatacacacgtttgatattgccggcctcgtcgcgttccatgctgaacaagcgaatgttctcgaccccatcacgggcgtcatagctgtaatggatggccgaatcttcatcatccgacatgtagcagcaccaagggctccacgcctgcaccagcctcttcccgcgccccttgttcacaaagccgtaggaggcgccgtaatccgcagtgtcggggaacaggtggcagcgcagcagcgtgtccatcatgcaatcccggtacatggcgtcggcggcggtgtccttcaccttatcgtcggatatcttgcggaaaccgttcggacgctgacggtcggtcacgctttcgctgatacggcgagccagattcaacgtgcctatctcgcgcatggtgcggtacacgggagccgcgttcgggcttgtgctgccgggcacgctcgtggagtccacaagctccttgccgtccttgtactgtttcagaacggcgagcatgggaagcctgcgcccccaagccgtagcaagctgggtgaggttccaggcatccgtatcctcgacggtcgcgttcctgatggcaagctgcacgtcgggcatgggctaacctcctaatagatgcgaatgggcgcgcgacgcctcttctcctcggctatctccagatagcgggcgcgtgcgcggtatgcgagaatgcccgcgacgcaggcatcgatcttgttcgggctggccggtgattccttgagaatcttgtagccatacgatttgtccacccggcgcggatgccggaaatggttgacgagcctcgggtcggcaagcaacgcgatgctgttcaacgctggctttctgccttccggctcctcatacgggtagcggaaacctgtggccgcgttctccgtggcctgatacatctcgttcttccagttgttcgtatagaacttgacgagatcgccgttcttgcgggggccgaccttcagtttcttcccgtagtccttctcccaagcgcctatcatcgactcgaagaaggccgcgtcggcaaagaagccgaccacgttgtacttgtcgagcatgtctctggcggcttggtcgaaagcgtcacggtcaaccctccacgtggccttctccggcccgtccgggcattgctccagcttgataaggaacagcatgccatcggacaccctgcaaccaacgagggctgtggagtccttcgacacggaaccgtcgaagccgagcgttatcggctccttcttggtgacgaatttctgccaagcggtttcgagcttgcgggaacccagataaccggccatctcgtccttgtacaggacatgggattgaatgtcggactccctgagccaagcgttctgcacgctggaaagattgttcaggaagtagcgaatcgaatctgcgggatcggtgtccggctgatagatctggtcaagctgaccatccaacgtcaaccacccgtccttggacgggccaagctcgccatcggtcagcgaataacggccatcggcgctcagaccggtcttgttctcaatcggcacgtcggtaccgtccttgagaatgatatggtccttcccatcagggcttttcaaggattgaccgtaggcaatctcaagagccttggtcatcttcttctcgtccgagaagtcctccacgtccaacgtcgcgtacacatggtcgaagtagatgccggcacgatgcttgattcgtcctgcggccacatcccacgcatacttgtacgacgcttcagcgatactgccctcaccgggacggtacatcgtggaggtctccatcatgaacgtgccagcggtaccggcacgcttgccgaggttacgggccacggtcttgtacacgttccacagcttcggctgcaccataagatgcgtctcgtcggcaagaccacaggtggtcagctttccatcctgactggaagcgccagaagtgatgggcatgatgattccgccctcgggaagcatgatacgggtcgtgcccacatccatgcccatgcccttccaatcggacaaggggccggaatcgcagttgtagtagatggactcgaacacgttgccggcctgctgttcggaattggccaagcacacgacctcgggttgggtgacaggcttgcccacaggctcaccctcgtgatactcgtatgtctcacccatgaacgtgtaggtctcgccctcacgcgcccaatggtcgaaacgacaaggaccgaaaccctcgaacatgccaacaccagcggccttgcccgacttgtcgcgacccttggctcgggaaaggaacagacgattgaacttgcgtttgccattcctcttcaacgcataggcgccgaccatgaactggtactcgtccaaatcgaaatgcataggcaatccgatgccgtcgccacgaccgataagcgtgaacgtctcaatccaccacaccgccagatgaccgagggaatgatcgtactcccactgcgtcagctggggaataatgtcatgcgccaccgttcaccaccctcaactgacggcggcgacggtcaacatcctccttcaccgcctcgccacgggtttccgggcgaccggttccggtactcatatcatcagcctcaatggcctcgatcttcgccttgatgcgggcggcgggcgtgataagaaacgagtcctcacgctgacgaatctcagcggccatcaccgcagaaggcttcgacatacgccagtaatcatccttcagcttcgccaaatccatcagcgaaaaccagtcggcctccatgcccatgcgcggagccataggccccgtctgcatcgacttgtaccagcgtttcgtcaagccaagccactcacgcccatcaggacgagtcgcgggcaagtccagacccatcacggtatcaggactcttcaaaatcatattcctaccggccttgctacgaccggaatgaccattgccagccatgcttcaaccccattccgcccgttccgggcacgccgaagccaaggcatttcgcctacaggcaacggttatggactagaagtcggttcgccaaagtcgcctgacgcgacttctccaaaggaaccttccacttaaacgccggaccatcaggcccgaaagaatcaacatcgaccctcttgccgcacacagcgcacacgccatcgcattccgcgatgacatccgcgtcggtgaacgactccacccgaatatccggctcgatatcctcggcctcgacctgcttgacgaacaagggggtttccggattggggggatatttcacagggtctttatccgacagccgcttgtacttgctgcgatgcttgccggaacagaaaatctggtcaacacgagacggttgaaaataatggcctataggacacaaacgggtacgaaacgggataatcggactccccgcataccggtcacggtcataatgatgacggcacaagccgcgcgcatacaccgcattcccgcagccggccaccatgcatacatagccgctcactgaaacgccggatgcgaataccattgctcttccttccggcgttcacgattcatgcgccgctgctcagcggactcctgcgcggttttctgcgaatgatggtacgggcacaaggcccacagattcgacggggaatcatcatcgggctcaccgttcttcgcgcgaaccttatgatcgacctcattggccgaatagccgcaaatatgctttgcccccgtatgccaatcagtcacaatccactggcatcgatagcggtcccgctccaatatctgcttgcgggtccgctcccatccgggattgaaccgtgcatcacggttggaagatgaccaagccatgatgactccttatgtatataaggggacggaaccggtgggagcgtggcgagcgagcattccaacggggttaatccaaatacaagggagttggcccacgggccaccggttcctagaggcaatcccgagaatcgaactcgaacctgcgctttacgagagcgccgctcttccaatgagctagaatgccacgcctcccactagagggagcgctattcagttattgccgtacggcatggcatgaagccgccgccatcggctggcgatgactgagaagctgtcaccgccaagagctgcctcttctcaaggcatcgcatacccgggaagaatcgaacttccgtaaccggttttggagaccggtgcctgaaccactcggccacgggcatttggggtagtcaattgtttaggctggctgacataccttgaccagacagcggagagagtgggagtcgaacccacacgcgcttgcacgcagactgttttcgaaacagttgccgccgccaatcggctggcctctccaagtctcgcaacgcattgcacgatcagtatgcaacgatctccgggcgctacccgacattctctgcaaccaaagccgcctaggcacttagccccagttctctgccagattcttgaactacattgcgattgtggtgccggggagaatcgaactcccatcgccaaaggcagcggtgttacagaccgcgcgcactccacgtgctcgacaccgtggaagccatcccagactcccgcccccagtgaggaaggggcactcctcagccgacatcaacccacgcgaagcggggagccagcacacgatgccgtgcggagattcctgcacgacgccggttcacgggcggtcaaaccccaaccgacagtcacggccttgaccggcctcaccgaccatctcgcggatgatgcaagatttgcacttgcgaaccttttacggtttacggcctagcaagccgccgcattcgtctactctgccaatcatccacggccacgcccccggtccaagaaaacaacaccaacacaaaacggaatcccagagaactcgaccttacaaatcctcgtaaaattgttttgacggtttggttttcaaaaaaggcgtggcctagtcgtgagagagggaatcgaacccacaacacaccgggtttgagccggcgtcctctaccaattgggatatctcacgcaaatacaagaaaaccccgcgactgcggggcctcaccttgtcaggaacccgagcttcgctccaatccctgacaatccatctacacgacattttactcacaacaagcgttgcagcaagcgttgcagcaagcgttacagtgaagaaaatgtgaaagaacagcactcaccgtggaaacgaacggcttttccgtaatagccccagatcgcatccagcgtcagagctagagtcgcagcggcccccatgtcttaccggggtggggctctcccacccccatgtatgcgtgtgcgtatgtgcgcgtgcgtatgtgcgcgtgcgcgtatccgcgcgtgtgtacgcgcgtaggcgtgtgcgtgggcataggcgcgtgcgcgtgcatgggcgtgcgtatggacgtggtcatgggactgtatgcggcgtcggtatggggttgagtaaggttggctcatgttttgtgattgttgcatggtgcaactgttgtatgtgcaaccatatacgcatgaggtagtggcctagactctatggcgtggtggtttttgcgtggtttatggtggtttcgacacgccgaggggcgctagtgtttgcaagggtttacgttgtgcccgtctactgccgacttgcgtacccaaacggtagcgcgtatagtgatggctatcaacaaacaacaaacaccaacaacaagaaaccgaggtacagagatggacaccacaactcaccacgtgaatacggcagatatccgtacggcactaatcaaggtggtcaacaacctagccacgacagaccaatacgaaacactcggtatggttaacgtccttgcaatgctgacagcggcaaccctgcacattgattgggataatgagcggtttgacgacttgtttaacaaggtttacgcagacctcaacaagtaatcagcgcggccatagtggctaacgctagggtgcaagtccctagtcgcgcacttagtcccctctatccaaaactcatagtgagcggcgggtaatcaggcggacatgaaccattgataacttaacagtgaacgccgatagtcgcgtgtgataaacgcggcgcggtaggcagaaaacataatgcgtggggacgttatacacccccatcagcgcatagcgtggcgagcaagtggcctacctattacggcaatgagacggcgggtctccggcatggaattgtccccgctatggacgttgccacttatggtggcagacatggagatatctcagtatcttcttgcgacggctaaaccgagcgtctggaatttgtataattgggcccactgaacggatagcgaggtgggtcatgactgacaactgtattagggagtatcgagccaagcgcggctggactcagcaacaattggccgatagggtagacggtgtcacacgtggcagaattgccgcttgggagactggcgctagagacttgcaagacgcttcttttagtgtcgtgcttagagtcgctgacgcattcaaaatgtctaacccacgtcgcctattggaggcccctaaggagccgaaagaaagcactagcgaaagctaggtgcgagccctaatcgattcaattcttcgcctgactgtgggccttgtacacagtcggcctagctcactgggtttatcccatagtctaggcactcatagcgtgtcccaaggtggacgggatacgctggaacctgttatatcgaaaggtggtgagccgtgccggttggcgatatcgtcgttgacccgcgtatccagactcgacatcccgacgtgtccgctgattcggtgcgcgtggcatggtcgaacgtcgtgcggtttatggcgcgtgaggataccgacccgttgcgttatgtggcggttggatacgacgagtacgggcgtttgctggaaatggtggcggtactagatgagtcggatcgttggcatgtgttccatgccatgcgtgcgacgccgaaggtgctgcgggaactgaaacttttgtaaaggaggaagtgtcatgtcttttgttgcgaagggtggccgtgtggtcactgatgacatgttggacaagtgggccgacgatgcggataacggcgagttcggcggaaggccgggtgcggtgtattccgggcctgtcgttcctgtcgctcaggcggatgctgtcagtcggacgttttcgttaagcgctgacatgtcggccatgttggatgccgtcgctaaacgtcgtggcgtgtccgctgatgacatcatgcggcacgcgctggtgcgtgagttcgcgtcagtgtgagctgttcggcgtgctggttttccgacacgccgatttgtttaaaccaaaatgatacgttatgctatcaattatcaagcccaatcgggcaagacaaaagcaagtttgagaacttaacagtgtttccctacatgcaaatgatacattttgctgtcataattggtttacctactactagagaaagcgggtaagcctatgggacttaaggaactgcgcaaacaagccgacttaacacaagttgagctagccaagcgcactggaatagcgcgaacaatcatcagcagttatgagaccgggcggcgagacgttcggaacatgactcttgaaaacgctttgaagatatccagtgcactcaactgccaaccgagcgacctgatgcgttaaaagaatgcggctaagtagcgccaactacctagccgcgtgccttaagttgaaagttctctaaccaatcaatcaaatcgaggctgtgctatcttagcacgcctcacatggaagtgaggaaccatgcgtaaaattctggcgacttcagccgcgttaatcacacttttcaccctgtccgcttgcggtagtgataccgcgaacatcccgcaatgtgagaacgaagacggctcgggtcaagctggactctgctactgggatagtgctcgaatgggcaacggacgcggtaccggcctgtacatctaccaagacggcattctaatcgacgaacgctactaagtctttcaatcagattcattcagtcgcgcggctgtctccgcgcttcaacaattcaaaggagattcaaaaatgtctattgaggaaatgtgggacgcgctgaaagatgattacggtgtgtccgagcagactttgcaagttgtcaccaatatcaacggctacagtaccgacaccatgcatgacgtgttgtacgcggtggccgcagaacgtcaattcgatggcgaggtggcatgatgtcgcgttttatcaaaacctattcacggcgcaagggcacttacggtttcgacctttaccgcgtgcattacccctacagcaacttctgcgttgtcccgtggtatcgcagtggcaacgagacgtgcgtatgtgcgtctggacaacagtgcttcgacagcatggacgaagtgagggcgttcatgaagtcctacaaagtccagaaactctcatgaccatctgcgatggtgcggcgcattaatccgcgcttcacgcccgctcgggcaatttcaatcaattctcaaattcatagatcctttatcacactaaggggtgtgtcatgtctgaagaagtactgaatccaagcgactttcacgttggctggttggcccaatcgttggccggcaacatctacgttatcgtaaaagccactgacaagacggtgacgttcgataaatacgataccgtctggcttaccgttcgacgtgtccggcgtaagcgtttcgagcggacaattgaaggaggctacttcaaggacggtgccttcacgttctggccgagtaattttttcccgcctgagaacggcttcagccgcaacgatttcatccaatcgcatgagtttaaggcggtggaatgatggcacgctactattacgctttctgctggacttacggtgtcggcaaaaaatgggatgacgggtcatggcctgggagtctcatggtgttcgattcgatggcggaacgtgacgcttgggttgctggcgacgtgtttgatggtaactggcacaatgaggccattacggccaaggaggcgcggcgtatcatggcggacactgttatctgtttcgacaatgatatggccgcacggtacgacggcagcaagtctgccattgaacggtatgcgcccattgttgaactggtcgaggcgtggcggcgtattgacgcgcaacttaacccgatcgagtactacacggactaaaagaatgcggctaggtgtcactaccacctagccgtgtgcttcaaataagtgaggtaatttgaggcgttgccattctagcacgcctcacaagaaagtgaggaaaactaatcatgtatgaaaaatctgcgatggaatttgcccggctactgtgcgcgcaactcaattacgtttacgcggatatgtacgaccaccctgataggtggcctaaccagttcgagctagccactgagtttgatgagtttcagaccactcgcactgatttaacggccttgtgcttcaaggtgaggcatgacttcatcagtagtgaccgtgaggcggcggcgttcatggttgcctaccggcggctcatggcgttcatgtcgcaacctatcgaggcggtggcgtgatggactatcgtaataccccttcgggtaccgtcttgggtgtccgcaagttcgctgacctacccaaggacgcctattttaaccattggtccgagcggtacacgttcaacagcggtaacgctttcagcgcttgcgtcacgcaagaagcacttgacttcttcaagcctgacatgcgtaagctgaccatattcatcgatgatgaattaggcgagtacgtgctatggcgtggcatggctttcgaggtcagattgtacgctcaaaaattccgtaaagcctaatcgtttccccgcccactcgggcaattcaatcaatcaatcgtaagggcatggcgctgaagccatgtccccgctgtttcaaaaggagcttgacaatgattaccgctgaagacattacggacatggtggatcgcgttgacgcgaaactcacgcctaaatgccggtatgacgggtttcagccttgtgagggtatctaccgtctgggcgattacgggtatgtcactgaaaccgagtatgacgcggctttcgagggtgagccctattgggctcgggacgcttacatgttggaaggtaacggcgtagggcatggcagaatcgcacgactctacaatgacggcgacgttgaagcgttatccgattacgtcaatgagcgtttcgataacgaccagatggacgacgttttctataccgaagccaccgaagagggtgagtgttgagagtccgtcgtgttctgtttgtggccgcgctagtcgcggcttttctctttctcaggtgggttggttttatccagccgactccccaatgttccacgccttacggcgttaatgacaccgtgacctgtgttgatggcgattacgcctatcaccgtggcgtgcaaatctgacaatcaatctttgaagtgaggtaaatcaaaatgaagaagctggctaatgatccgtcgcgtaacgtgaatgccgtgagcggcatgtgggttcgactgcgcaaggacggctcgaaatatgatgtacggtatgttaacgctagggtgaagcgagtctggtcgttgtcccaaacgtccgagggtaccgcgtggaacgttcaggctaggggagtccagtatgaggattttctgaacggtatgaagtcaagttcggttgaccttgagcatggctggttgctagtgcctgactcggaacgatgtggaatcgttcgggtgccggtgcctaccggtatggacgcgaaacgtgtggccgccattaaggctgatccgctggttgatatgaactggcgcaacgatggtgaacggttcctgagcggcgttcactggccggtgcctgtacctgttgaagatgagagcaagtgggctggtgaggatgagtttctggatgatgaaccggcgccgattactcaggagattgctgaagtcccgcccaaggtcaacacgtttgccgtgtcctacgcgactctgcctgacctgatgatggctaaggaatgcccggaactgcaaggtttgggccatatcaaggcgttccgtaccagcaagggtaaaaaggtggcgtacatcgcttcggccaacggcaaatgcgtagtcgcctaccgtgcaaggtatgagcgtggcagtgacaagcagttagaacaggcggtggccgattacgtggccgttgcccgtaacctgtgggctaaggcggcgtgacatgagcgagctgagagacaaggccacgcgactgttgttgaagtcggcgtgggaaatggctgacgacaacgaagacgagctatccgccgtgttcgatggtcagcatggtttcacggatgatttgcgcagacgtgcgatcgataccctggagggtgtcggctgtatgcccagtacgccgcctgacaatgatgagatggagcgtttgattgctgattccggtttgtcgttggacgtgctggatatgaaggcgcgtgaggtgtacgactgcggttattccaccacgtatcagcgttatcagacggctatcgccatgcttatcgatgatttgctgggggtggattgatggaagtcaagatacctaccagtaagattcgtgaggttatggaatcttccggctatgcgtatacggctgagaatatcgcggcggtacgcgccaacattccgcttcacacgtctgacctgattctggccgcgttgaacgccaccgacttgcccgacaagcggtttgctttgccgctgttctagttcttgccgtccagctttttcctcacttccactggacggcaacccatttttttctacaaaccaaatcaatattttttaggagattattatgagcgccactatcaaacttacgttgagcgactacagcgtccgagaacgcttggacggctggttgcgtatccctacggtcgcccaatacttgtatcccaatggcgaaacccaacagttcatggacatgctggacgaactggacggcgtggtacatgatactgaggcacagtatgaagacaggttctcgttcgatgattacgctgattttcttgagagtctggcacctgaatatcgcaaggcgtttcccatcgcgccggacgggtggaaacgcaaggcgggtgagatttacatctactggtaaaactcggatactattctatctcaatatggtatatgattgataccacctgttaaccgttaaggaggtttatcatgggtaagctggtcgccaatgtcgatgatgacgtcaaggcgcgtgccgccgcgctctacgattccatgggcatgagcctgagcaccgccgtgaacatgttcctacgccagtcgctggtggacaacgggttgccgttcaggccgcgccgatatgagggcatacgactggtgccgaccgaggagacgcgcagggccatggtggaggcggaggccaaggaactgggactgatgcccgacgatgccgtggaatgccggacagaagaagaggtgcttgaccatctgcgtagtctcagggagcgtgcgcggtgagctatacgataaagttcgattcacggttcgactctgattatgagtggctgagccgtacgcaccctgaactgtgcgacgatctgaacgacgcgattctgctgttgcgtgagaacggcgaacttcccgagggataccggcctcatgtgctggataacccgggcggcaactataacgggcattgggagttccatctggccggtgatgttgacgtgcttgtcctgtattggaagcgcggcaatcgtgccgtcatacgcatggtgcgtataggttcccattcggagttgtttagaagcgaattgttatagccgttatcgttttcatggcctcatggacttgttctatggggccattcttatagaaaccatcatttagaaccgcatcatagggctttctatggtgcggttttcacataaatcagcatttagacgggactttaggactgtctattgtcccgttaatcgttttaccgaacaatagaaagaagattttccatcatggatgaagaaaccgaagaaaccgaagtctatacggtttacatgcatgtgacgcagatcgagaagcgtcacgtcactgcgccgaaaggcttgacgtttgaccagttgagcgactgggttgacgaaaacggtgttggagacctgttggacattgatgaactggacaacgatatggtcagcgccgattacgaggacggctctcatgtcaagaggaagtgggcgaattgattaccgcaatctaccgttttgagcgtttcgaccccgccactaacaaggagttgtggcggcgcatacccggctggaggctgcgtctcatgtggcttcaggcgtggcttaaacacgataaggcggctcgaatcggctataaagcgtggtcgtacgcgtgtgtttcaggtggcggcgagtggttgaccggcgacatgttggactggaatcaggaggtgtccaagtgaacgtcgaacgtatggagaaagccttgcatgaggtatggaaatactacgacgaagcaggggaggccggcaagaactatgagcttgccccggataatctcgccaagttcgccgccgatctgtgcaaggaatacgagaaatcttgatacactgaaggccacgggactatcttgtggccttctgggaattagcaaaccaaacacaagagggcgtggcacatgtcacgcccctaacatttttcaggaggaatattatgcctactcgcgtttctcagagcgtcaaggaactcaaggagctgggtcgaaacctgtacgcggccatgaggtcagatttcgaggtgaatcctaacgcttcagcgcttccgctcgactatttcgagcccatcgtcacatggtatcaggctcataaagacgagccaaccatgctggacgacgtgatggaggcttgcggccgcgccggactatccgcaagcgacgctgacgaactccgagattacgtgggcacgctgttccaggacgggaagctcaaggtcgaacgcttgtgggagctgacctctgaatcaacggacgagtggggcgattccacgcccgtgccgaaccggtacactgacgctgaaaagtgctagacttgaccattaccggcgtttaatgccgtgttgtcgcccggtttccgggcgtggattgaaacattcttatcatcagtgcgtcccgagcatatcgttcgggacgcttgcaaccatacccaaaggagctattatgactgacttcgatacgcttttcgacgcaaccaacaatcagagcggaatcatcatattccccaacaatgacgtgatcatcggcaattggacgtattcggggcatggcgtcccgcgactctccccgttcggtgacacgctcgtttccaccggcaccatcgataaggctgaggataaaggcttggtcaatatcaaggattatctcacaggattggacggtttcgacatcgtttatgacaggaatgatgattacccgcagatcaaggccgatgacatggcgagattgtgggagatcgtcaacaataacgagaccctacgggtgcttgccccagtcgattggaactagtgcgtgtccggtgctaattgacgggcggttaccacgagtaaaagaaatgcggccggaagggcttaatcttccggccgcgccactctcaaacactgtacaatcaattcaagaggcgtgctcaatatagcacgcctcacacgaaagtgaggaaatctatcgtgattacgttccacttcagcacctacccggcagacggtgccgtcgccgcgcaaagcgataattggtggctgcattccgaaaccgaagacactgacggtatcgagcctatcgcgttcacaccgtccgaccccttggagtccgattggtcaacggatatcgacaaggcgttgaatgaggccggatacaggcgactcagcgacatctcctacgatgaatacgattccacgttcactgcggaacagttgagacgataacagataatcggttatctgttataaaatagcaatgctgataactgataaccataaatgtgggcccgattatacaagaaagcccgtggaacactcgaaatagagtcgttccacgggcttttatatatttgagactgttagaagcagccactgcctctcaatgaagcacactaggacggcattcccataggataaaccaacaggcacgatcttgaccgagacgcggatagtatcaccattccgtgcgtaagtgaagccggcgggtatcttgtttcctcaggttttccagcatggtttccgaacaataggggactggcttacgtttgatcgtgcgcagcagcttctcctcggccattgtgcagcggcatgggttcatcttgcagcgtctgcacacttgaatgttcacatggtcgccattcgtggacgaaaaactgtacaacatcgacccgaagggaaactcttcggcggcattgccgccgtcgatgatgaatatgtgtctcattggtcttctcccaaaccttttgctttgttgcgtgcatggtgcagctgttccgccaatgcgggcgtcatcgtggctaaatgtatcgaggcggtcagcatgtgcactgtcatgtagctggcaaacgccttgcagcaggcaatcagcccttggtgaagctcagggcggctgcggaacatgtcaggctggtagaccattgtcttgcccagttccgccaacttgttgttcacggttttgagctgaccggggtgaatcggctggctcatgcgtcctccacggtgattttgtcggtagcgtgcaggcggatggtcaggcttccactcaacgtggcttcgatggtttgttcgtatccggtgattatgtccagcacggttttcgcttcccacgggtgtgcgtccacacgcagattggtgagcgtccccttcaactgattgccctcgtgattcaccgtcagggtttttcccatgaatcgcggacacagttgatcggcttcaatgagcattctcataactggcccttggctttcctcgtgtagtattcctcggcagacaacaattccagaatcggagtctgcttattgacctgcaacaattcctcccaggtcatccacgagtacccgcgtaagcccgaatgcccactgacctgatatacgtgcttatcgttgtcgccgtacagcaaaacgtagctattggaataggctttgatgatttgcgcccacgtctctccctcgccagtctggatacgcgcccagtattcgccgggcgaaaccggttcttcaatacgaatacgtggtttctttggtgctgggcgggtggcgtaatcgaaatcctcctcgtagacaacgagaaacatggaagccggttccttttcgactcccagcttccacgtggcggaaacaccaactccgtctacctcgaccttaatcatgtcatcccaatcaatgcgggacttgaacttgtacgtgttcgtgctgcccttgacgtgaatcagatcgccgggcttcaagtcctcccaatcgacgcgaatcttcttgctcacttgtattcctccttgccgatatcgctgaatcgtgtgtaaagccggtcgttcacgacatacgtgttgtaatcatcctgttggatgtaccaccagcggttttgatggccagccttcaaatactcctcgcacgtgtggtcgatagtgttgtcagggttgaccttctgcctgaacgacaattcatcaaccacgttgctatcggccacgagaccggctatccggtcgatacgctccggcgtgaaatcgggagtgaccacgtacacgacacgcaccttctgacggtcgaaccatttgcggggcaatgccaacgccacgtcatcggacaagctcgtgggccgcatgtgatacaccacgcggctgaacctgatctgctgcatgacttgagccacgttgcgtccgcattggaagtagctggtgtgcatctcggtttccgtgagacagtctccggccctgtgtatcgcctcccggtagaaggcgacacgtttcgatgcttccggctcgcgcatggggaacagggggtctccgccgccgctgaagctcaggaacctcatggggtggtgttcgctttcacggctgatggtcttcagtgtggcctgcatgtctgtcaccggcacgttcaatccggttttctttacgatgcagtaggggcatgtccaatgacagccgaaattcgtgataaccgaataatgtccgttcattgtgtttcttcgataagctgttccagttctttcatgttgtcctgcttgcgtttcaacgcattgcagcgacgtatccactcgcgtttgcgctgatagacgttggttatcccctcgttgcccaacagttcgttgcacgagcagacaagctgggggatgtccgactccgagtccggttgcacgacgggtttctccccgcaggcggggcattcgtgaaccggaacgttaaccattgccctcaacagtctgcaaccggtattccacttctgaacgtcctcgtcttcaaataacggggcgaacgagctgatgattgcggcgtgatcgcaccactccgagagctgccacccggctttttccagacagtagtagcggtcaatggtgatgtcgggtacatacttcggtttgggtctgcgcccgcagatagggcataattccaatatcggtggttcaggttccggtttttcgaccggttccggctcctccaagtgcagcagtcgtttcagccagttcacatgcccctcaattccatcgactcgttgaacgccttctgaaacgcttcgacaccggcgttaacggcggtttgaagctggtcagagttgcagcccaccctcaccctcgcttgaaaaggcgcgtcaagggcggggtctttcagaaaaggcatggcaccggtcgaatcgattctgacgggaacgtcaaccttaaactcagtcagcttcccttcatcacagttcacgctgagccacaccgacgtggaatcgtagaaaacatgcttgttttcctcgttcattcatcctcctcgtcatcatcatctgattcaacgggcacatgcatcatgtcctcggcaagcgacagcaatccgcacgtggtgaccggcgactggtattcgggcgtgtacacgcccaaacgccacaaatcctcgtgcatgtcctgcaacgtgctgcggtcaacgatcacgacgtatggtttcacgccgagaatcggggacaacgccttgcgtacccgggtttccatgtcttcggtttcagtcaactgattgtcctttcatggtttgggtgaatgccgtctggaatgcatggacaccggctttaacggctttttcgacggaaccgttgggcggcggcgtcacggtcacgtgcgctcgtggttgcatgtcgtcgcctatgaacacgctgtccggttccagttcgcccaccaccgggacttccacggtgaacgtggccagttgaagcgctttggagtacaagcccaattccacttccgtggtgccaagattgatgctcattgagtaatctccctgtgtccgaggaacttgttgacgaagaacgtctgacctttgcccgtgactttcggtgtcttgttgatggtcgtgtgaccgtccgagtgaaccacggtggtttccttgatctcgaacaatcccaattccatagatttctgcgtgggcatgttgcgagagctgccggttttcatcagccatccgttatccctcagccacgcgaacaagcgagtgccgccaatatccacgccattgcctttcaggactttcgccaagtcgcccacaaggatgctggtcttcgaggtttccacagcgtcagcgaacaacgccttgggacgcatccgttcgacctgtgcttgggccttctccttttccgcccgctcctgtttgatttgtgtggcaagccggataaggaagtcgggttcggtgactgccttttccaaagtcgattcggtcatgtacgcgccatgtttgcgaatcgatggcagcacctcgtgcgtcacccagcgtttgaactcgcgggcttcgggcttgcggctgcgtaacacgagggagtacaagccggactcggacacgaaaacgggtgccttgccgccgttctgggcaatgtccgtagtacggatattggtgatttcatcggcatcgaggtattcccgaatatggttggttgccgtaccgagaatggcgcatacgtccgctccaaggaaccacgggttgccgtgttcgtcggttaggacacgcacctgaatgccgttgaagtcgaatggttgaatctggttgctcacttgtcgtctccttccttggattggttttgcgaagcctgcatgatctcccacacgtccgcgtcctccgacaggccggacgcgagacggtagaagtcactgaaccggtaaagcggattgctgtacgcatccttgccctgctggggcaactggcctcgatgtatccaactacgcaaagtgctgcggttcacgtgcattccgcacgccttgatgatgtccaacagttcgccgcgggttctcaccgcctccgattggaggagacgtttcactcgttccgccctgataagggctaccggcatactgaaaccgcatttcgggcatttcgccgtctccgcgtccgcatagcaggagagctggcccaagcactcgtcggcggggcatggcccgtacaatacggtttccccgtcatcgtccgtgaggaaacgacgcagcttgcgtgtcagactgtgaaccagttccgcgtacacgggggtgctgggatgctccatgagtttcggatgattggcgatacggtgaaccatgtccgatagtggcgtggactcgggcaggttgattttcaggctccgcatccactcgtacaaggtgccttgcaagcccggataaccgtggtcatcgtccgcgtacagcaggtcatgcagggcttcgcgtaacggtgcgggagcggtgctggattgaccgccgccaccgttcttgtgcccgtaggcgcggttgatgcgatactcgcacaggtcaggcaggctgcgttccaaccatcgcaggtcgccggataactggctggcgtgcttgtcgcacaggagattcaggttcggttcgacgccatgtccgataagcatggacggcgcgtcggtgacgatatcccgccagcaaccgtggtagcggcagagcctcgtagtttcagtggaaaaagacaatagtgaccttgaccttcggtttttttgaaggtctcggacgtgtcagcaactctcaattatgccatcaaaccggtcatgattcagccggacggcgtgtcgccagaacctcgtccaatgtcacgcccaaacccgggttgaaaccaccaccctcacgccggcgcttgggtttcgcgggcggcaaacgcaactggtcacgcgcagtcaacgccacccgtcgagactcgtccgaggaacggcccatcatgcgctgacggcgatacaaccacgcccgatctcccaccagtcccagacgttcgcactcccggcctatctgcgcttcggacggtttcgcaccgttgcgcagtttgcggacgatggcgttgatgtcgccggaaccgcaccagcgacccgtgctgttgtccatgtagaagcgtcgaacggcctcacgcgcctctgctgccgtgatatccgaacgcagttccgaatggaacgcatcaagctgaacatcatcccactgagcgttgccgtgatgcgcgttaatcagcgacaacaacgccgccgcctcacccttgctgagcattgaaacctccctgcgagtatcgggcacgctcctcctcggtcatgtactgccaggtcttcgccatgttcgcttcgagattctgctgactgcgggacttgaccggctggacttgccgtggactctgggtttccggttttggtttctcccagttgcgtgcgtacagttccccgccgatgaaccggctgaacgtcttcacgaaccgttcctcggtggccccgacatacgctcgggttttggcttcaagaaactcacgcgggtcagcctcgccagcagccctcacgatcttgggccattcgatttccaactgcattcgagcctgagatgtcttcccgtcgaacctgttcgtcgggtaaagacgttcaaggctgtcgagcagtccagcgaggtcgggctttgagggggtagggggagtaattaataaattactatctatatctatatctatatctggttggtttttcgttgaagagtcgttggattgacgttgaacgtccgttgggttttcgttcaacgaatcgttcaacgtttcgtcaacggttcgttgaacgtccgttgcaacgggttccaacgcttttttctccgcgcgggcttgtgccgaggcgagtccggccttgcgagcggcttctttccgccgttttgtcatctcgtctatctctttactggagaactgggagtcaaggtaatcgtggattatccaaccgttttccttcggctcgaagaaactattttccacaagaagcctcaagtctttgggtgtggcaccgagcaggtggcgtgccgtgtactctccgatgaatccatcgtttttgcgatttgccgcaaaagtaattgcttttatccacacgattgccgcacgaggattagcggaagcgaatttcccgaacttctcgttcatccagagattcgcgctgagcttggcaaaaatttccgtatcgttcgacatgatcatgctcctatcagccagtacgtgtaatcggggaacaccatgtgcatgaaaatcgcgcaggtagcgtagacggcagagacaacgacaaaagcgacaacaccaatcaaaacgattatcgcggggtcggtgaagcagtcactcaggctcaaacggcatttgcgccaccagtaccgtaccagcagtatgaaaatgactgccagtacggttagttcgatgaaatgcgccaaccccaccagactcattccgtctccttcaacagttcgcgtaatgcgtgaatggcgttctcgtcatcggcttcggtcattctgtcccagaaatcatgttccacgccggtagtcgtatcggctttcagttgaagcagagtcacccaatcataaggggaacggatgtagtcggttaggccgctgtccgagtgccaagggtatgcggcgaagctctctccgttggctttcgctctctgcgcgtaccatagggctttctccaagtcctccttgggatggcccttgtctttgtgtcgccacacgtatttgatcatgttgcccacgttgaacgagtattgttcggtgagcaggatgcactcgtatgggccgttctcataatgctgtggatggttcacgttatcggtcatttctcgtccctttcccgaatattctcaaccattccgcaccacttgtcccatgcttcctctctcgtatcggcataaggggcttccaagtgggtgcagtaaaacgtgtagcggcctctccattcgaatatgagcgggacacatccgcagaaggggcaacagtgccgaatcctcgatactagattgaacatgttcgtctccttaaatctcgtatgaagttgtggcggcttcgccagtccgagggcgtgccgctcgtcgccatcaacagcacgccgttgtcatagaccttccaatggccgctaccagcgcgtaccaccttgtacccgtgcgaagccacccaatgcatgagtttcctatcatccccacgcgcggtcataatcccagcctccttgcctgttcccggctaagccgtaatctcgcctcgtggagacgttgcctgatctcgtcgcaaggcaatagcctgtaggctcgctcccaacgctccacctcacgcatgagatcgtctaacagcttgtccatgacgtgttctccttatcgcaacggcccatccaataatccagaatgaatttcttggctcggggcatccgtattgcccgcagtcctcgggaatatccgggcgtaccacatacaggtcatagctcattcttcgtctccttcgatgattccatgtcctgctatcaatgcgagggtctttaagtcggtgagcacgggctggttgtccatgcttgacaacgtgttcaagccgagacccttctgtttgaacacgacgaaccagtaaggtgcgtcagcgttacccgcctcggtacgaccctcctgcatccactccttgagtctccccgtataggtgctgtagtttttacactccaatacgaccggctggccgtggatacgcagaccggtgatatcgccctggtctttcgtcccatgcaacacctcacggtgtatcgtctgctcgctgtcacccaaccgggcgcgcaaatagttgaccaccttggattcaagcagtgtgcctttggctttctgtcggctcattcgtccatccaccattcagtcgggtcatcatggaactggcagtccatgcagtttccgaaaacattgatgattcctccgcagtacgggcaatgctcatactggacgggcagataactcggtctcataatcagaactccgggttgtctcgcagtcgtttttgcacgtccccgcgcatctgctcgatcacatcgacccgaagtccggtagccaagcgaatctcctctgccggacggttcgagtcttcaatgagcagttgccatgctttacttgtcgctttgctcaacatgagcccccttctccaaattagagctgatacgcacccgatagtcggtgatgctccaagtcagatggttcaactgccagacggtgagtccaagaaaacacagcagacaaaacgcttgaacaatggccatcatcgtgttctttgacgtgatgcccaccgcgagggagaacgagtagaacacgtcccaccccaaataccagtacacaagccataatccgggtttgctgccgtcacgtcgttcgtaaaccgtgaccatatccttgtcactcatttcgattccttcttctgctcctgttcacgccgccccatacgccttgcaatgggtagccgctgattctgtcgtgttgcgccgcgtaccgtgcgcattcgcatatcgccggacattggtcgcaggccttgagcgccaatcgttcctcgctggacgtggtggggaagaacaggtcagggtccatgtcacggcatacggctttgtcacgccagccgctcatttcacgccaccggacgcggggtcgataagctcacacgacatggcgtcgatgtgttcgccggtcttggcttcgaggcagagccgtttcacgtcgccggtggtttcgacctgttggatgatggtctgttccggtgccggggtcgtaaccgcgtaggcggtgagtccgatgacggccagcaccatcgcgacgctgacggagccgacgatgatgaagacgagcccgatggttgattccacggtccatgacgacctgcgttgcatggtttgactcctgtaaatctccgacagtgtttcgataccgtcgcgtactgccgtccgctccgtggcggcgatgatgatgcgcgtggccttgtccgcctcatgatgggcgttgggattgctgtggcagcggacaagccacacatggggcagcagccgtgtcacacggacacggccccgccagttctcatagtcgaggctcatgattcctcattgagcgtggcgacatatgcgatggccttgcgttcacgcttcgcatacttttcgcatttgcgcttgagacgtttgaggctcatggcgtacaggaagtctctgaagtcgccgtcctcgtagattttggctcgataacggccgcaggtgccttccgcgctgattcgcgcggtcaaatggtccgtaagctgaatcttgctcatacggtttcccctttctcgaacgtcttgatcatttccatcaacgcggcctgatacgactcatgccacttggtgcggtaatgcattcggtcaacgcatttgaaccgatagcgtttctcctcggagcctttcacggttcctgtagcggcctttaggtgtctgccacattgggggcagtagaagctttcgccgttgcgaatgaaatcggagtcccgcacgtcgcctttgccgactatccggtagaagtcatcaagccaactcattgtccgcctcccatttccttctctcgcgccatgacctccacgtcgtcggcgagcatcctcagcacgccggcgagcgtgccatacgattcggcggtcggatacaccgtcttgccgacatacacgtcccacctgtcggaaccttgatgattgtcggccttgaggataatgagcgggtcggcgtcgatgaaacgaccgtccttcatgccccgcactttgagcatcagacgtatcgaatccgcctgctcgctcgtgttgcccaaaatatccagagtgctcatcgtctgcctcccagactctcgcgaatcagcttgtatttccggtctccgttgcacatcacattccaacaacggatagcggcggcgagtatcgaatccttcgtgagcgtccacggcattctgggtctttcctgcgtgtcgataagacacttgtacgtgcatttcccgcatttgaaaatcagcgcggacagaagcggatatgcctcccatttcgctttaatcttgcccccgcatctagggcacgggctaatcctgtgaaaacgcatcagtccatcctttcgtccaaatattcgatgtcctcctagatcgagagcatgacctgatcgagagcgcccctactgctcaacgcccatacagcgccgtagttggtgcgctcacgtgccgccgtgacatagcccttgtccgggtagacgtgggattccgcaatccagtggaacgggagcatccccttgcgtaaaatcaaagtgaaacgactgtgctcaaccttgatgaagctcctcatgtcgctcattcttccgttgcctccttcggcttggtgtcatagctgatgtcgatgatgcgagtcacgttgaactctcgtccgcagtcctcgcactcctcctcgaagtattcgtcattgccgccgcattcatacgaatcttcgtatcggtgcccgcagtaagggcatacgatttcgtcggtaccatcgaactcggtcggctcacccgaatcgatgagacgcttcttcggaacgcaatcacagcaatacgtcttaccgtcaatggtttcgccccaacgtttggtcatgaggtcgccgcacatatcgcactggataagattgttcattcttccgtcgcctccatcgggtaattgatgtcttcaagcgagtccgcgaaataggtcagcttcacgagcctgaacggtttctgcgtctccgggcctctgaacggtggctcatattcccaccattcgctgccgtcgtattcttcgcggcgcaggaaaccgccatcggtgaacaccacgaccagatcggcggctatctcctgaccgccgtagccgtcgtcgtaatcgatgtcgagcaccttttcggcctgactccacggaattcccagcttctcgtcgcgggagcctacgaatcgaacgtcatcggtcgaatgctcgctttgtgagatcgcacccttggtttcatctaaaagattcattcttctgttgcctttctcctcgccgcgttgaaggcgattctgatgatgttttccaaatacccgtcgggaagcatgatgaacttccgaacttcgcctatggcggcttcgatttcctcttccgtgggctgacgctcagcgccacgctcataggcttcgcgcagatcatcgctgtcgtagagcagacgcataaggtcaggatgaccgggcatcgcggaactctcgtaaatgctttccgcctcactgctgataatgctcacagtcggcccctctcctgattgcgaacaaggcaatcatccatagcctgagccagttcctcgtcggtgatgtcgaacgcggcgattaagttgccgaccgtctgcaacacgtcggccagctcatcgagcatggcctggcgacgctggtcgcgcacgtaacctatccatccggccttcgccctgtcccggtcatcgccaagctcgccgcccacattcaccccgaagcaggcgagacagttcgcatgatcatcgaactcccggccaatgccgctcgggtctgtcgggtcactggctttcaggtattgtttgcaggcttcgaccagttcggcgctctcctccagattcttcacggccagccacttgtcgggcgtgagacggccgaaagattcaaccgaaggcaattccacaatacgattcatgcttccaccgccttagcgggacggaacggggcaaattgagataggcgctccgcggcttctatcgatgaagcagggtacgagattgaggctgctggcgggtccttcggggcaatctcaatcactgttgtcccggtgactaaccacaggccatcacccttgtccagccagagtccatcatggtcggggagcttcggtttcggacggagtccgtaggtgaaggcgttgaagccaagggcgatacattcctgcccgacagcgccgtatacccgaccccagaatcggttacggcctttttccacatctgtgaccttgtaacggttgccgtcgagcgtaacggcaatatctttctcttggaggtcatcagcctcctcgatacgctcgtagttggggtcatccaacagttcgacggtatcgacgtaactgggaatgatgggctgcgtatcaaatgattcagccgagaacacgtgtaaatatgttcgatgcgcgtcgagctgcatcgaaagactacacataccgtccgcgtctctggaacgtcgcacgagcttccctatgaatacgtctccgttctccattgtcaccttgactcgcttatcgagattctgaatctccataagggtcttgccttcccagaagggtttctcactcattgacagcctccttggccagttgtcgtttacgtttctgattcgcctcatactgggcggctttaccgggatgctccaacatccaacggcgatggtattcagccatctcacgctgatgggcggcggcatacttacgagccgaagcccgagcctgagccaaatgctccgaccggtaccggcgtgcatactcattgcgtttctcacgattgcgagcgttccgccgattcgccagatcacgcagatgctgcgcatactcggggtcggttcgacgccgttccctgacgcgacagttccggcacatgccatccttgccgacccggtacgtgcagccgcaccaatcgcatttcggatgacgttcagttatcaggccggacagttcgccgccgttccggcaatagtcgatgaactcctcatcggtcatgtcatcaacgttcacagccacacctccccattagtgaacctgcggaacaacacagggtcgagcttgtacaacgcccgccgaaactgcgggtcacggcagaacaggatgaacaacaggcttactgcttcggcggttcgcatcgcgtccaacctcccttatcgtccagaagcacccaaccatgttgggcggtgagaatcggcaccagttcggggtgatcgttgaaaccgctcacgatataccccaagctcatggcctcacgcggatgggcgtgaatccacccatgacatcccgtatcgccactcccacacgccaagatgaggttcgacgcctcatgcagtcccggccacttgtgtgaccggagtctgcgatgatgccggctgaaaccgctccaatggaatggtttgccgcagcggacgcaccggtattggtcgcgtgcgtccaccaaatccttgacgtgttgggacgggttagatctgcccattcccgtattcgtcctgtggctggctccacgggtccgcaggctgctgatactgctgctgcggttgctggaagccctgttgcggctgctggaagccttgctgatactgctgctgcgactgctggaaaccggactgctgagactgctgggccttgggtttcgcgctcaacaccgcaatggtgcgggccgcgacatcccaattctcataccgtttcccatccttctccgacacccttttggacaagctgccgttcacaagaaccttcacgctcatattcggctgggacttcaactggcgaacctgattcaaagcatccttcgcctgattcgacaagggacgcacaccatagaactgaggctccttgtcaacccactggttcgtgttcttatccgtgtaacccggatggacgctgacgttgagaatactggaatcctgaaaatccttgatctctcccgcatatccggtaagctcgatgcttggttctccggccattacgcattcctcctgtaattgttcgtcttgtgtttctctatggcccgcttgttgcagaccagcatgtgtgattgggctccggcgcaatcaacggcaccgcatgtggggcattgggggagcgtgatcttgtccccgtgagcccacaggcatctggcgcacttgcagcccggcctcggggtgaaagtcactcgaagctcgcctccaccttcgtgaacgggaagcgaccatcccggacactggtcttgaagaactggctgcgggattgggactggcatgggaaggcgggggcgatggtgccatcatgggcgagcaccggcatccaacgtttgccgtcatgcttccacaccgattcggtgcgagccttgtagaatcccggctccttcggaaggtcggccatcgtgtacggttcgtgatacgcatactggaaggcgtagtcctccgcccaccaatcgcacacaacacagaacccctcgacacgcaggcacagagttatgccgtccgtacactcagaacgcacctgcaccaccgtgtacttgttgccgttcttcatcaccgccttgtctccgggacgaaccttcgtgatatcggtgatacgctcacgcggggcatcatccgtgcacgggacatcatccaccagttcgatggactcgatgcggcccactgggacgaactcttcctcggggtgaaaacttgcgctgaggcagtaagcgttatcgatatcaccgatctcgttcgtcactccggtcactacgtccccgttcttgtatgtgaccttgacgtgcaggtgtgccatctccccgcaggttttacccttccagaacggttgctcgccatcatcttcggcctgcttgacggattccgtctcgggcttcgactcatacacatgcacgttccgggcggaaccggtactgtacccatcgccaaaatccaagaaaaccacgagattgcccgcatcctcggtctcgatgtacagtggcggcttattacccagaagcatgacgaaaacgtccaccagattttctggcttcttcacctcatgcagttcgcccgcataatgcccgtaatcatcatcgaactcaacccacatgcccggtttcacgtcgttcaaaccaatctcactgctcactgggagcctccttaaccttgtcgttgtgctgtcgataagcgtcgatgaaccgttgcgcctgatattcggtcaacgtgccataggtgacccgcgtttgcaggacgttgccgatgaaaccgttctcctgacccaccggaatcttgcagtcttcaagaatccggtcgatctgtgttttctgctcgtcggtcatacccttgacggaacgcttcttgtagccgctcgtctcaccgtcatcatccgtggtcgccagtccgaacgcgccgcaagtgctgtagcgtcgcgcatacgtcaatgcggaaccgagggcctgcatgacgctcatgccacgcgaatcacccacctcgaccgggataagacaattactggcaatccacttgtccgtgcccttcttcctgacggccgtatccacatacaggcgtccgtcaatcaactgggtcggccattgcaggtcgaacccctgctcgtccacatagttcacgacctgagccagggtcgcatacgtgccacgcccgccctgagcgtccttcttgattaccgccatgattcaatctcctcctcttcctccaacagcttccagtcggggaacacgacatccttcgggtatttgggcaacccgtaggccctcatggcctccaacgggtcctccgtgttgtcgcggaaccatttgatgccctgcaaggcgtggtttatcttcggttccgctagttcggtgatgatgggcgaatcctcctgaatctcgtagcgcatccagtcgaacggcgggttcttctcctgcacgatgaactcgaaacccaacggccccttatattcgggcatcgtcaaccggtagagacgcatgtagaacgcggcctgaatgtgatacccgtactgccagcaggaacgctcgaactcgtccggcgacttcaccgtggtcttgtaatcacggatacgcagcacaccatccgggtcgggagtggacggcaaccagtccgccttgcccttaatcgacaatccggtatcggggtcggcggcgatcatcgccacctccggctgaccatccagcttcgtgaagaaatctccaaccatgtcccgcatggcctcgaccttctccacatcatcgggggaaagccatacgatatcctcgccctcatgcagtttcaatgtctccgcatacatggctttgccttccttggtgcgtaggttcggtttcgccagcacctcggggccactgcccaatatgagactgtgagccgccttcccgaactcgaactggggggaggacgaatgctcgccggtcagatactgcgaatacgccaacgggctgaccagatacttcttcaacgcggtctggtccaccgcgtcaaacgcgaagtaatcgtcatcggtcatctgctcgacggtcattgcctttcctttcttgctttgagtgcttccttgtctaaaaccttgatggtgtcggccaccgagtcgggaaaatcgtcaacgtcattcggggtcaacatgagaacccctcgactgcatggacaattgttcttcacgctccattaggtgactgtgacgccaagtacgcgacttgccctgcttgtgagatgcctccgcataatcggccacatggtcgcggccaacgtcgccaacgaccttcgatgcctcgttccaatccgagtacacgcggtcgttcacggccacatacttgtccgcgagataacggacgcaatcaccgagataacggatggctctggcgatagagttgaaatcagatgccatcagtccgcgtcctccgtctgaatctgagcccacgtctcctccatgagaggcctgtcgatctcgtagtagatgtaggtcttcccgtgcttcggcgggtagacgccgaacttcgtcttgtagttctcggccaaacgggagccgaaatggagggcgtttttcttcatcggctcgaatcctttcgaacgtaggaagtcgctgatgatgagacgaggcaagtcgggttccttcgatgtcttggaaggagcggcggaaccgtcgagaatcagacgtgcccgacgttcaagctcgtcctgcggcaatagtccacgcgcctcgctgagtagtctcatacggtcgaatggggtgagttccatgattgtttcccttcactgggcttgattatttggttgtccttctacgccggtgctgacacgtccgaaacccttgttttgctggtttcgacgcaaggacgcgaaggggttaaatttttctgagcgccaagccgggagtcggacccgggtgtgatcgtgaagtccatgacatcggaacgcttcacgaccacggccaccgtgcgcttggctccatcggccggggcggaaggtaaggaataaaaagacccccggccggaagcattatggctactcgcgtaggaggtgggagaacgtcagtggggtacagcagcagaagcccgccagaatgctccacggtcccgcatacggttggaacgcgaggacaaggaacccgcataccgtcaccgtcacgacagcaagcagcataaggttctcaaccatgtggcggcgttcgtccatggaatgctgccagccggagcagtgcgccccatacgttttcctgttcatgacatgtcctttcctcgtggccggactcggattcgaaccgagaacgtccttgccgtcaccgtgtttctggtttctgagagatggatgacgagtcctatggtgtggtgacgatggtgcgtgtccagacaccccgaagggttccggccgatggttgccgcagcagatcgcagtatggtatttatttgcctgtagtcgataggtggataaaaaacgacccactgcggcaagacttgttattcctcgttcttctcgtcggcgcagtcagccaagtcctcaagggccttggcggcgaaacgcgcctgacttggagtgagggggcgggcaccgtaatcggtgtcgatttccgcgttgatcagaccattttcggtgacgttgccggtgaagtattcacgggtgcgacgctcctccacaacgagcttttgggcgaggttgcgattagcgttaggcatttgctttgctccttgtaagattcttctgtatgacggttcttggaatggagtggtgggagttcgccaccttgatatttgctgcactgtcttttcttggcatgtgctggcagatagtcagagccgaaagcctcgctccgacgccgacacttcatatcgagtgggatgatccgatcgaggaatcggacaaaaccgttcaggtgactctttggatacgtccagcgttcggcttcgacttctatggggtcaaggtgctggaggcaaccgactggccttacaggagggaatgctggctgaaacgcgacgaacggaaagtcaccgaagacgacccattgtttcatcgcctgcgctatccggttgatggttccgggagctttgtcattcaggttctttccgtctctccgataaggaagaggctgatagcttgtgcttggaaggtcacagcagccgacgcgggagcggacctatctggtccgaaacaacggaggctcctgacagaaactcgctcctggtgggtgtggtatcccggcgcggagcttcttggatggttggatcatcatctcggctggaagattccattggggtattggcgggaagggaagggctcgtatcgagcggcattgccgctgtccgcaatccctcgttcctcatagggtcatccatcctgattcggatgctcccgacccaacaagccagaacgaagatggacacggactgaatcacgtcggtgagaaactggatcaccataacgactccttatccatactcatctcgtttcatgctgttacctccaagtcaggagacttcatgccggcggctaagcgagctgaactgatgatgtctgccattgttatgccgagcgccacggcgatgtcgttgaggtcgtcggtggagaaagccttcctgaaattgaagcgttcgtagaagaatttcttgttgcgccccactctgtcggcaagctccggggtgcttacccctcgtcttgctgcctcagcacgaactgcttgaatcagccccaccgaagtttttgaaagctttgttttcgtttgcatatctttaacgtaccgcatacggtacgtcttgtcaaccagaaacggtacgaaatttacaaacgtaccgaaattcggtacgatatagttatgagtaaatatggatcgcagttcactcaacgagtgatagagacaattgaaaacaggcgcagagacgccaaaatgaccatcgatgacctatgcaaagcttcggggataggccgtaattcctattacgcaaaattgcgtggtgaacgatgcttcaacaccgaagatattgacgcagtggccgaaaccttagggtgcgatcctttccttattctggaagaagcctctgcgccggagcctcaaacgcaatatgcctcagtcgcttcccagcttgaagatgttctcggcaagaagattcaggtcgagaaagcggcctatgaggataagaacaagcaggcggagtccgggcgtgaaaacatggactgacctcaccggtgaggcgtgtcatatgggagtactcatagaggatagggagttcgatggttcgcagtgcggggaatacgaccccatcacccgcaccgcttacattgaccccaccatgagcatggaacaacgggtatgcacgttgcagcatgagcttatccacgccaagcatttcgatgacgggctcagactattgagccgtgataaggaggagtgtctgacgcgcaaggagaccgcgttggcgttgattaacaccgtggactacatgcacgccgaagacctgtacgggggagaaccctacgcgatggcgcaggaactcggcatcaccgtcagtgtcctgcaggactaccggcactggctgcacgacaatatatctgcacgagccgcgtgattgttatctctcaaattatctgagtacattggctcgtagcacctcttctggggtgacgggccaatgcctatatttatccaaaaggacggcaagtgagtgtagatcatgattcgacggcaacatcgtttggacggaaggccatgcatattcctcgatgaaccactcatcgaaccaacattcaaggtacaggcgtttcccgagtccgttgtatacagcgtactttagttcgatcatttcttggcctgtccgtgcggcaaaaggtttgcctctgtattggagcatatatccgtcgctagtggatttctcccagtggttatcgtatttggcgcaatcaatgattctggtggttgtgtctacgagagccgtgaacttttcccctttaaagatgcgccgaagaggcagaggatcatatgtgtggacttttctttgtgaattaccggtaatgattattccagtggttccttttgggacaattaaatccctcaaatactgcgcatacttagcagaatatttcagcttgtccatttgtttagtataaacataaagcttgctttttatgtcaacgaatatccatatccggtcacttccaagatacaattagattgttaacttcgatgaagagaaggggataatcgcaatctgaatatcctcgcatggcccaatggggataatattgtccatatggagagagcggtttcatcaagggggcatggtgtcgagtcagtcaagaacatatgagtgttcgtcacaaaaaatcagaaaagcaattgattctctattggagtcacggcgttattcgccgacctatcttgtcggagaaggcggtaatataggaatccgcacatcttccggctgtgaactaagcgtgagcgttcgtggtcacgaagtcgtggccaaactcgtcatcgaaaatgaagatacgtatggaactcttgatgttttcttccgcgacctgactagaaagatacagcgtatggaggcaatgcaggactctcctcaacagataaaaactatcgaggaacgtcctgatctatccggtttggagactgcggatgcttctctcgataatggggcggatgaatcaggtacgaggcttccctccatcgggatactgaatgcttccggtcatatcgtcaaagaagtttcagccccgtctcttgctgtgataacggcgtgtttgattcttctaatttggttgccttcgttccttattggctggcatggcgggtacgcctctcgtaatcccacagagcaacctgaatatacggagatggtcaattcctatgacgatgaaatcaaacggtttaaagaggcggtgtccagcctcaaagcgactgtaaatagcggccaagcccagataaatgagcttaaaccatataaagatgaatatgaccagaagaaggccgagctagatcagcgacaatcggacttggataataggtcggccgaactcgattcgcgtgaaaatacactgaaacaacaagaggacgcaccgtcactaacaccgtctccggcaaattcaggttcgtcctacacccccagtagctcatcgactggtcggacgtactacaaaaactgcaaagcggtatgggatgccttgggacatggcatttctagaggagaccccggatatgctcccgatttagatgccaatggagatggtcaggcctgtgaatataagcctaactactaaggacttagttgtgtcctgtatctctacggcaaaattaaagcagctgatatcggtcccattctcctgtatcggaggacgggaccattcttgttcgtatgaaaagcgccgtgaccttatcgtgggccacggcgcttgacgcataccggacgctcactatccaagtatgttttgcttatttcggttggctatcaacattccatgagacacttcgattatgcttggcgacacgcatgacgtcaagctcgaacctgaccagttcacgccttccattcgatctgcttcaaatcgagcccgtcgcctatcgtctccatgcctcgcatcaaatcctctatcggcacggtgcggtaatgctcgctcatttccacggacgaatggccgacgatgcgttggatgatgccggcgtcaaccttcatgtggaacaggaggctgaccaccgaattgcggcattcatgcccgtaccggttctcgtagtcggggatgcccgccctgcgcatgaggtcgcgaaacgaggccctgtcatccaacgcggccaacggcataccctcgcgcgtcctgaatatcaggttgtacgggttcgggatgatgctctccgtggcctccagataccggtgcacgacggtgcccaactgggggattatcggcacgaccttgcctctcgcggacttcggcggcgtcaacgcataccccttgcacaggtgtatcatgtcgtatccgtccggcaccctccaccggtatcgggggcagctcgaaggccgtttgaaaccgcacgggtaccttccgtccctgccgggctccccgcacccatgctccttgtcgaggctttccagcttccagttcaccgtgtaggtgcctatccatatctcgccgctgtccggtgtctccaacgtcttgtcccgccacaggtcgagatcgtccaatgtggctcccagtatctccccctgtctcatgccggtgagcagacgccaccattggcgtgcgcccatgaacaggtcgtcggaggacgcttcgagcatgtcctgcatctgcttcacggtgaacgccttgcggtcctgcgtgccgctgcgcctgtccgtcgaaacgaccacgggcccgttgatggtgcgccggtccccggccaatcccgcgtccctgcgtttcggcctcgccgcgctggtgaccgggctggtgggtatcagccggtcggccaccgccgccttgaatatctggttcaggatgttgtagaaacccaactgccggtcgtatgagcatggggtgccgtcgaggttgcgcatgttggctatcatgcgctgcaccgccgaggcggtcacttcgcccagcttctcgttcgcgtacctgctcaggtggacgcttatgaggctcgcgtagttgccggtggacgcgggtttgaggtcgcgtttcttcatctcgaaccattgcgccgcgtattccccgagacgggtggcgcggtccacacccatgccccattcggttttctccttgagggcttcggctatcttcctgtcgcattccttgtaggtcttggcggacacccatcggccgtccaccttggcctgccagttcacgtatgtctttaccgtgccgtccttgagtgtcttccgctgctcgtggcggatggggtagaccgctccggttttccttatcctaggcattcagcatcctccattctccaacattctccaacaaacaatccgtggcgaatggtattccaatggtataccaatcgtatcaaatcgttgaaattccgccgttctttccgagagagccattgatttcattatacgttactggatgtggaaggtgtgctgaactagcaccttttgtttctgactaagaccccttggaacagcaacaattccaaggggtcttggcgtattggaaatgttcttggctagagagatgcagatggatttagcaacatttcgcaacaaataatatgatctaggtcttctgcacgttgcggggggtggttatggttcatccagatgagaacaggagcaaacctatgagcaagatgagtgacatgacggaataccatgcttcagcctaccgtttgccgtcaggcttcgaacactgctcgaaattgaagccggtggctgaggcagcgacggcgctggaccgggtcaaggccgtggtggatgtgctgtattcgccgggcggctgcccgtgggacggcaagcagacgaacaagtcgctgctcaagaatctgctcgaggaaacctacgaatacgtcgacgcggtggagactcacgaccgtgacaacatgcgcgaggaactgggtgatgtgttgctgcaatccgtgtttcaggcgcgggtctgcgaatcggatactgaggacccgttcggtattgatgaggtcgccgatcggttggtgaacaagctcatcactcggcatccgcatgtgtttgcggctgatgatgccggcaattcctctgattcttctgatgcttttgatgctgacagtaacgacgggggagaagctgcccaacccgaatccccggaagctgtgctggctctatgggaaaagatgaaacagcaggaaaagcatcgtaaatccgtgcttgagggcatttcccgcgctcaaggtgcgttgcctcgcgcggccaaagtcgtttctcgcatctccaaatcgccgaatgctgatagattgttcgcggcgtttgatgagtcggctgcggctgatgctcagcgagatgatgtacatcctcaagcggcgaaccaatccgaatcaagcggcgacaattccgctgaacgggagaaggccgatgcctacgccgatgaaatcctcgccgtcgtgcgcaaggcccgcgttgacggcatcgatatcgagtccgcactgcgcaatcgcttgcgtgatgtcgaagaaaaagtcgccttgattgaatcagaaatcaacaacgattaagtccatacatgtttttttgatcacggatcgtaaaacctagaggtgctgagttgccaacgactaccggcaagctggcgtcattgccatcctattcacgtcttagtggccccttcctccccggccatactactcaggcaaggcctgttgtaggctcgggtacgacgggctgtagcgccgaataaggatgaacgggaacagaacgaagacggactgagacgaaccgaagcggtaccagagtggagcggctcatgcaggtggcgttggagaacaacatcgtttttgtggtcatcgagtatttagcaatcctgtgttggggattatcgggcggacttgccgccattcgcaagggctacgacatcttcaccatcatgctgtgcggatggcttaccgcactcggcggcggtcttgtgcgcgacgtgatgctcggtgccctgccgccggtcggcatcaccgacaaaggctatgtgctcaccacgctgttttccggcattatcgtggtggtggcccatccggagatcaccaaactcaaatggacgatgactgtcatcgatgctctgggcctcggactattcgcagtcagcggcaccgcaaaagctctggcctacggttcctcaggcatgacagccgtattccttggcatgttcacagcactggccggcggcctcattcgtgacatcttcattggcgacgtgccaatgattattcgagacaaacacctctatgctgtgccttcgttcatcggctgcatcctgaccgtgctggtatggcgcggcgtaagctacggctggttcgacatgcgctcggaaatgctgctcgacgtgctgatcgtcatcatcgtggtggcgctgcgactgctctcggtaggcttcaacgtcactctgcccggagccgtcgaacgtcatcgcgtctacctgcccagcgaaagccgatatctcaagcgcccggtcatccatccgcacgccgataccggcgatacccccaataccaaggacgaagaagacaagcctcaggatggttcaaggccgcctcagggctaactgccttcaaagaggtacatttggccttctgcagaatgacaactgctttcaaagaggtacctgaagcacgaaacgctgagtataagtgttgcaatgacgacgtttatatatgggttttcccgtattcggtacctctctgaacggagatgtcatttcgcaagaccgccaatgtacctctttgaacggagatacaaaaagtcccgcaagccagatgacttgcgggactttctaaaaccttaagaggcttatgctcacagagcgttgatcgcaacagcgaggccggacttgcggttggcggcctggttcttgtggatcacgccagcgccagcagccttgtcgagcttctgggcggcaaccttgtaggcggcctcggcggcagccttgtcaccggcggcgatggcttcgcgggtggcgcggatggcggtcttcaggccggacttcacagccacgttgcgaaggtgcgccttctcattggtgagcacgcgcttcttctgcgacttaatgtttgccacgtttactccaaacgatgtgtgttataaggacatacaaaagttagaggatagcatgagccccggaaaaacccgcgcaatgccacgccgaatacagtccctcggctacactaggtgaagtttgagtatatgccaagaggaggaatgcgttggtcgtccaacacaatcagccgggttccacggatcagtcggtgattcgcaacttctgtatcatcgcacacatcgaccacggcaagtcgaccgtggccgaccgcatcctgcagttgagcggcattgtgccagagcgagagatgcgcgatcgcttcctcgaccgtatggatatcgagcaggagcgtggcatcaccatcaaatcccaggccgtgcgcgtgccatggacctttgacggcaccgaatatacgctcggtatgatcgacacccccggccacgtggacttcacctatgaggtgtcccgcgcactggccgcctgcgaaggcgcggtgctgctcgtcgacgccacccagggcatcgaggcgcagaccctgtccaatctgtatatggccatcgaccatgatctggccatcatccccgtgctcaacaaaatcgacctgccgtccgcagaaccggacaagcacgccgaggagatcgcaggtctgatcggctgcgagccgagcgacgtgctgcgcgtctccggcaaaaccggcgaaggcgtggccgacctgctcgaccagatcgtcatggacgtgcccgccccgcacggcgaccccgatgcccccgcccgcgcgctgatcttcgattccgtctacgactcctaccgcggcatcgtcacctacatccgtatggaggacggcgaactgcacgaccgcgaaaaagtccacatgatgggcattggcatgacccacgatcccatcgaaatcggcgtgatcagccccgatatgacccgcaccaaggcactcggtgccggcgaggtcggctacatcatcaccggtgcgaaagatgtgagtcagtccaaggtgggcgacaccctgacttcggccgtccgcccggccgccgagccgttgcccggataccgcgaccccaagccgatggtctacgccggtttgttcccgatcgacaacgcccagttccccgaactgcgtgatgcactcgacaagctcaagctcaacgacgccgccctgatttacacgccggaaacctccgtggccctaggcttcggcttccgctgcggcttcctgggtctgctgcacatggaaatcgtcaacgagcgactctcccgcgagttcggcctcgacctgatccagaccgccccgaacgtcacctacgacgtgaccgccgaggacggcagccagcatcatgtgaccaacccgagcgaattcccggacggcaaaatcaagaagattgtcgagccgatggttgccgccgacatcattacgcccaaggaattcatcggtgcggtgatggatctgtgccaggaccaccgtggcattatgggcacgatggagtacatctccaccgatcgtgtcgagatgcactaccgcattccgctggcggaaatcgtgttcgacttcttcgaccagctcaagtcccgcaccaagggctacgcttcccttgattaccatgaggatggcgagcagtccgccgatttggtcaaggtggacatccttattcagggcgagaaggtcgatgcgttcagtgccatcgttcaccgcgataaggcgtattcgtacggtgtgatgatgaccaagaaattgcgtagtctgattcctcgccaacagtttgagattccgattcaggctgcgattggttcgcgcatcatcgcacgtgagaacattcgtgcgttacgcaaggacgtgctcgccaagtgctacggcggcgacatcacccgtaagcgcaagttgctcgaaaagcagaaggctggcaagaagcgcatgaagatgctcggccatgtggaggtgccgcaggaggcgttcatcgcagccctgtccaccggcgaggactccaacgaccgcgacaccaaagacaagatccgtgccgcccaaaagaccgagggctagtgttcgaggtctacatccacgtcccgttctgcttgcggcgctgcggttactgcgacttcaacacctacacggctacggatcttggtgcgggggcctcgcgcggccactatgccaatatggtcattcgggaaatgaaattgaccaagcagtggcagctcgaccacggcatcgaggagccgccggtctccaccgtgttcttcggcggcggcacccccacaattctcgccgcccgcgatctggtcgccatgctcgatgccgtccgcaagatctggagcatcgcgcccgacgcggaaatcactaccgaagccaacccggacacggtcaacgagtattacatcaatgagctcgctgccggcggcttcacccgtgtttccttcggtatgcagtccgccgtgccacatgtgctcaaaaccctcgaccgcacgcatacgccggccaacgtggccgcaggcgtcaatgcggcgaacaaggctgggctgcgctcaagcgtggatttgatttacggcgctccgggggagagccttgacgattggcgcacctcggtcacgaccgccatcgatcttggcgtgaaccacatctccgcctacgcattgaccgtggaacccaccacgaaaatgggccgtcaaatcgcggccggcactctgcccaagcccaatgacgatgacgaggccgctaaatacgagatcgctgacgacctgttcgccgccgccggcctcgaatggtatgaggtctccaactgggcccgccccggatacgaaagccagcacaacctcggctactggcgcaacgtcgattgggccggtctagggccaggtgcccactcccactacaacgcggtgaccgaggctgaccacccccagtcagcttcgctgacagcccccgctggcgggggctgtccggcggatgccggactgggggtggtttctgtctcacacggtctgcgcagctgggacatcgcgcacccgcgtttgtggggcacggccatcaacgagaaccgtgtgccgtgggccgatagcgagacgatcactcccgaggaaaacctcgaagagctcatcatgctcgggctgcgcctgcacgagggactcgatctcggccgcatcaaccgcgccatcaacgatgcgggtatgagcagcacgccccagactctccgaaccgtttcggttgaccaactcgcccccatgatcagcgaaggcctgattaccgtatccgataatcatcgagtggtgcccactcgtcgtggtcggttgctcaatgactcggtaatcgaacagttcttcgatttcgtcggtgtatgagtcggtggtatggtgcgcggcagtcgccattacccgttcgctagttgtggttacaccgtcagagggagctatttttgttttaccggcgggggagggaaccgcgtaggactacgtccggggcgctttgcacgtagatcaggcggttggcagtgccgccggtggcctccccgtcatcgcggttggacaggatgctgtccacggcggcctggcccatttcggccagcggcagatgcacggtggtcagtggcggaaacacgtcggcggagtaggggatgtcgccgaaaccggtgacgccgatttcccgacccggctcgatgccgttggcgcgcaacgcggtcatcgcaccgatggccatcacgtcgttgagcgcgatgattgaatcgatgcctttgccgtcgtacagtgcgccttcgcccggcttcagcagtccggatcgggccatttgcatgacggccgcatagccgtcggtgcggctgaacttaccgttcgccacggctttcggatccacggtgatgcctgcctcgtccaacacttccatcacaccggccagtcgttctttggaggagcgatgtgcgtcatcgcccttgagaatcgcagggcgcgtatacccggaatcgacgatcagctttgcgatggcgcgcgcgccgacatcgttcgccacgtccacggccgggaagggcaggttgcggttgagcacgaacacggcacgtccgccggatgcttcgtactgggtgagttccgtctgcaacgcctggcgttccggcgcgtcggtgtattcactttcggagatgatgatgccgcgcggcctggtggatacggacttacgcaccgcctccaactcttcgtgcggggtggctgccacgccgatggtcacggaaataccgcgttcggccgccgccttgaccacgccttgcgatacggatgcgaagtagggatcggagatatcggagaccagcagcacgatgttcggtgcggtgcctttggccactgcctgagcataggcgttgggacgatagttgagcttggtggctgcttccatcaccttgacatacgattggttgcgtaccttgcgggtgctgccgttgagcacgcgggatgcggtggcgatggagacttgggcttctttggcgacatccatcaatgtcgctggcgattgcgccttatcgttctgtacagccacgatcgaatcggtccttttcttccctgaaacggaaaacgtgtctaaacgtttaccgcaacgatatcgcatttttgcttgcaatagtagcattgtggattggaaagcctgaattctgaacaaaaaaataatcacgcgaattacggaaagcgtttaccgtttcggcgtgtcgtgcggtatgctcgaagcatgacgcgatacttatgcgcccctgactccttcaaagagagcctgaccgccatggaggcggcccgggcgatggctcaggggattgagaatgccgaccacgatgccgaggtccgttgccttcccatggccgacggcggtgaaggcaccgcacgcgcgcttgtcgacgccactggcggatcgatgcacgccgtgccggtccacgacccgctcggccggcctgtcgaaggccacttcggtctgctcgccgacggcacgaccgccgtggtcgagacagccgaagccagcggactagcactgcttgaagccaaagaacgcaacccgttgatcgcctcctcctacggcaccggcgaactcatgctcgccgccgtccgttccggagccaagcgcatcatcgtcgggctcggcggcagcgccaccaacgacgccggtgccggacttctgcaggcccttggcgttcgtcttctggacgggaacggcaacgaccttaagcacgggggagcggctctcgccgatctggccaccatcgatatcagcacgatggacccggctctcaagaacgtcgccatcaccgccgcctgcgacgtgaccaacccgctgaccggccccaccggagccagcgccgtgttcggcccgcagaaaggtgcgtccaaagatgatgtcgccacattggacgccgccctcgcgcattttgcgcagggaatcgacagccagctcggcgttgccgtgaacgacgtgccgggtgccggcgcggctggtggcatcggtgcagcactgaagggcttcctaaacgccgaattccgcccgggcatcgccatcgtcatcgaacaatccgggctcgatgcggccgcgcaatgggctgacgtggtgttcaccggcgaaggctccatcgacttccagaccaagttcggcaaaaccccggccggcgtggccgaaaccgccaagcgccacggcaagccggtcatcgcagtagccgggcatattggcaccggcatcgatgagctgcatgaggtcggcatcgacgcggtattcggcatcgcgcccggagccgccagccttagtgagctgctggccgacgcggccgccaacgtgacccgcaccaccgaacaaatcgtacgaaccctacaactgtgagcaggctcccgctggcgggggctggcgggcttcgcccgactgggggggcagcgctgagaaccaccctcagtctcgctacgcgagacagctcccgcagcgggagcgagtaccggaaaggaagacatgcgcgccacactgaaaaccgtgagctgcggcgaactgaccgccgtgtatcgcaaagacagcgacactggcatcgtggaactggcatcatggatcgtcgacgcgagctcggtcttgtgacatgattggtggtgatggaatcaacgatgagtccaacaaaacggcaccgcctcccattgcgcaatatcgcgcgcaatattacgcagcgtattggctctccgaatgcgtgtctgctaaacctcgtgttgctctatcagcgagctttccgactgcgcagctcaggcaacatcacgacgaacaggatgaccgccacaatcgcggtcagcagatcggcgatggcctgcgcggcgatcacaccctgatagccggccagccgggagccgacgaacagggtaatcgccagcatcacaccctgcctgctgatcgacagcacaaaggcgccgaccgccttgcccgcggactggaaggtgcaggtcgtgaccatcacgacggctacgcacaccaggctcagcagctgaacccgcagcatgccggcgcccagcgtgatgatggtggcgtcctcgatgaagaatcccatcagcagacggtcggacaggctgagcaccacggtcatcaccagggcgaacagggacaggaacaggtaggaaaaacgcagaatgccgcgcagtcgaggcatattgcgggcgccgtagttgtagccgatcagcggctgtgcgccgaacgcgaatcccacgaaaaccagcaccgcgatcatgatgactttcagcgcgatgcccatcgcggccaccgcgtcggtaccgtaggggagcaggaacaggttgatcatgacgatgccgacgctctgcgtgaggttcgtgatcgccgaggggatgccgatggcgaggatgctcccgacctcccgggccgtgaccgccagacgccggcgcgcgcggtcgatgacggtccgcgggtcgatggacaggttgctgctgtgacgcagcatgaaccagacgaaataggcgtcggtgcagatgttggcgatcacggtggcaccggccgaacccgcagcaccccagccgaacccgtggatgaacaggggattgagcacgatgttgaccgccgtgccggccaccgaaccgatcatggactgcacggcgtggccttcggtgcgcagcaggttggacggcgtcatcgacacgatgatgaacggcgagccgacgataatcagcgtgtagaagtcggaggcatactgccaagtgtcgtcagtggcgccgagcagcgcgagcatcgggtcgcggaacgccaggcccagcaccagaatcagcaggccggtggcgatggcggcatagaagcagaacgcgctgagtcgcttgccgtcggcgaaccggtgttggccgaacaagcgcgagatgaccgaactgctgccgaggccgaagatgtcgccgagggcgatcatcacggtgaacactggcgcggtgagggagacgcccgccaccatatcggtgtttcccgtatgcgcgatgaaataggtgtcgaccatgttgtacaccaaggtgaccagcatgctgagcaccacgggcatcgccagcgagaaatacgccttcggaatcggcgccttttcgaagagttcgttatccatttccgtcccttggtgtttcgttcttcagtcactgtgcaggatgccgttcggcgtgcatcacaggcattgtagaggcaacagtgtggacaacggacgggggagtatctcatgatgcggtgagggcgttgatgatgacgcatcgtgtattggcggccgtgtgcatcgtatgtgaacctgtgctggcgcggcgtacgcacgatgggaaaagaaagaatatatggaccccgttgtcccggttattgttcagttttactgtgttgaattattgcgttattcaattattgtggtgtgccggccgattgcggcctgagggggattgccttcgtatgtgtcatgcaatctcatgaacgggattgttcgctagattcagcgagcgtccttgttggcggcgttgatgatgtcggcgaacatcttggagtcggcgtagccggcgctggcgatggcatccataccggagagggcgagaccgcgaatcatggaatccttgagagacataatcattacctttcgtttgcgcatcgccgtgagcggctttgcgattgttgtttaagctttgttgttatggggtccgtggctaatctgattggattgccggaccggagccgatggctcagcgagcgttcttgttggcttcgttgatcaggtcgacgagcgtgctgctgttggcgcgaccgcactggctcatggagctcaggccgtacacagccagaccgcgaatcatggaatccttgagagacatcatgtttcctttcgttggtcaaaaccttggggctttgagttttgtttatcggcttctttctgaaaccggtttcagaataacgcagtccgatgacaaacgcaaggggactattccgctctcggcgtttctggcggaatatcgccgttctttagataccattcagtagttaagaggttgtctagtcgaccttctgacggccttgttctgagcgtacggttttcacgaggtatggcctcatgtcgcggaaatcgtacgctgagttgtcgtaagcgtacggttttcacgaaatggggtctcatctcgtgaagaacgtacactgagtcgttctgggcgtacggttttcacgaaatggggcctatcttcaccggattttgggcacaccggccttgagcagcttggtctcaagattgatggggcgtagcagatcctcatagaacacatggacgatttcggtgacgccctgttcccggagatgccgatcacgtctgcggtcgtactccattttcgcctggaggcttgcgcgattcttgttgctggtgtcggcgtatttggccatgccgtcgtattctgccacgatgatgcggccgtctgcgagcttccaacagaaatcgacgcgatatggcattgcgggattgtcgggattcatgaactgcacctgcagcaggggaatgccgaaagacaattcggtgatctggccacgcatcaatgattcgccgccgttttcgctcaggggatccgcgtacttcagcagcttggtcacggagacctcgtcgcagacgctttgaatcatcagcgactgcacctcttcgatggtcgtcagggactttctcagagccgaatcgtatatgggcagcgcctgtgggaatgggaatgccgcgcagtcgagcagcgttcgcgccggagtcgtcaagagaatgccgttatgcttccgcgtcggaatccgattgatatagatgcggttgagacgcgcctcgtctccgccgccgatgccggacttcgaggcgatgtgcactgtgccgtcgtgcagggaatagttgtgctgcagtccgtatacgcacgccgcactcaaccccgcaaatacccactgagggtggattgcggacaacgcacgtatgacctgcaatgactgttgctctctggtcatggtgttccaaagtgttcggtcggcgtacaggttcttatacggtgacaccagctccccggcatgcaggcgacgtttcagggcgcgccgttgcgcatcactggtgccatagcagcagcgacgctcctgcttcgcctgctgcagcagtgcagaaacttccttgtgttctttcatatctcgacgctaagggtgattttgatcgttgcacaagctcaaccggcaaatgtggatactatgtcacgcgaattgttgctgtggataacttgaatcgacgtcgacggctttgacgacggtcttgtcggaggcgatattggcctaggacaccttgctgcgccgccttccatgccgaaaacagtcatcagtgacaccgagggcatcttcagcgtacgttcttcacgaaatcagctgccatttcgtgaaaaccgtacgctcagaatgactcagtgtacgttcttcacgagatgaggccccatttcgtgaaaaccgtacgttgacgacgattcagtgtacgttcttcacgaaattagggatgatttcgcggaaaccgtacactcaccgcaactcagcgtacggttttcacgaaattattgatttggatataggttccccgtcatgaactacaatgaatcgcggcgaaaaacggagaaccggagtcggagcgcggctgaacggatatgggtgtgactggatggctgtcatagtgatgccggttctctaacatacgcaataacaacaactgacaacaacaggggagacaaggatggcgagaagtgcgggccgcacccggccggtgatcaaggacgtggccaaactggccggagtctcggcaccgaccgtctcccggtatctcaacggcaccgtcaatgtcaccgaagacaagcgtgaacgcatcgccaaggccatcaaggagctgggctacgagccgagcattgtggcgcgcgctctgtcgaaccgggagatggactccgtggtggtgttcgcggccaatccttccgccttctccacgtccgaaacgaaccatggggtggaggccgccgcccgtaaacgccggttcctgctcaatattgtttctttggacgagtccgacatggactccgtcaaggctcgcgtgcgcatgggtttgtcgatcaggccggcgggcgtgatcgtctacgagtacgaccgggccggcatcgccgcactggaatacattcccaaagatatgccgatggtcgtggtgggtggcagcttcggcgacggcgaataccaggtcatcaacgccgaaagggatggcggccgttggatgaccatgcatctgctggatctcggccatcgcaccgtgttccatgtggggcgtccggaaggtccgaccgataacacccgcaccaatgggtggcgtgacgcgctcaaggagcgcggcgtcacggcacctgacccaatcatcgttcccgacgatgatttggaggagtcggtcaaggctgggcgcaccttgggccgtcgtggtgatgtgactgcgattttcgccggcaacgacgagactgccatcgctgtgatccggggtctaagggaggttggtcgccgcgtgcctgctgacgtgagcgtcgtaggctttgacgaccgcaacttcggtgccatgtggaatccggcgctgaccagttacacccagaacttcctggacatgggggagcgatccttccgaatgctgttcgaacagatccaggccaagcgcgccggcgatgacgcgccgccctcgcaggtcgaggtggtgcaaggcaagccgtgtctgcgagcctccgaacgcgcgtacggcgacggcgaaatcgcgtagtcgatggggacgtgcgtatcaatcgatagtgactgtagcgcatccatatcgtggtgaggagtctctcatgccgaactgtaagcgcttaccttaagtagtttgtaatatggtttacgtcataaaaatagatattctaaatcatagtgttttgcaagggcttttgcggaaaatggctatttatcaacagttttcgaaaagtccgcatgacgggcgactgtgagcacgctttatggtaactgctttccgtagcattatcgttagagtatgacttttgaacaatcggcaactctgaagactcagcaccagacctcgggcactatctcagcggcagacgccgcgatgcaatcggtccgcgacgaacgcatccccggcaaactcatctgcgcgatcgtggccgtggtcattgttatcgtgttcgtcgccatgctccacgccctacgtaaccggaagtaggttgtaggcgggattggtctgactggtatccgccacagccgggttcggtagagcggctaccaatcggccagtgtctctatggcatcgagtcctgttctgcgatgttgttcgtcaaggttgttccggtaaggtgattcatcggtgagcatgtcgtacgggagcttgatacgtctgcgatccgtgtggctatgtagtcgttaagtttcggcgtcagggtcgctgatgagggatgcgggcattgcggcatcgtgcagatgtctatctccatatccggcatggtctgcttggtatgtggcgctcttaagaatcaacgcgccaagcagatccgcgtcggtagtgggacgcacgtcgagaccgcccatgatggcgtgcaactgcaccatgagaccgccggtgagcagtcatgatttggtaatgcgctcggccaccatgtatacgatattccacggatgagcgccgctggagattgcaatgcggggaatcattgtccattttccttgttgtatgccgtgatgagttctgtaagggtttcgagcccctgcgcgtcgttctctcgggtcgttggattcggccagatcagcggcgcatacgccgatgggcatgggcccctgcccggcgggcagaaaatcagcgagatgccgtgattcggcgggaggtctcgtactggccccagcccttctgctcggtagtggtaccgctacaccgactctccccgacactccagtgccgccgatatcagtgaatgcccagcctgatgtcggtagagtaaaggctattggcttggtctcgacggtgagacttctccaatggccaatatgcactgttgcaaaggagtatgcggtatgcaaccaatcaaagccattcaatacggctgcggcaaaatggcgaagtacacgattcgctatatgcacgagaaaggcattcaaatcgttggtgccattgacgtgaatccggaagtcgtgggcatggatgccggtgtgtttgcaggcatcggccccatcaatgtgccgattcgcgccgatgccgaggctgtactcaacgagtgcgacgcggatattgcggtagtcacgctattcagcttcgagaacgaaatcgccaccatgtgcgagcagtgcttggcccgcggcatcagcgtgatcaccacctgcgaggaatgcatctacccgtggaccaccgatccggccaccacgaaccgtctcgacatcatcgccaaggaagccggtgccaccatggtcggctccggcatgcaggacatctactgggtgaatatggtctccaccgtcgccgccggatgccacagcatcaagaagatcaccggtgcggtgagctacaacgtcgaggattacggcctggctttggccaaagcgcacggttgcggtctgaccgccgaggagttcgaggccgagctcgcgcatcccgaaaccgtggtgccctcgtatgtatggaattccaatgaagcgctggcccagaagcttgggcttaccatcgcatcgcagacccaggccagtgtgccgtatttcagcgatgtcgacgtgtattccgaaacgatgggcgagatgattccggtcggcaaatgcatcggcatgtccgccgtggtaaccaccgaaactaatcagggcatcacgttggaaactgcctgtatcggcaaggtgtacgggccggatgatggcgatatgtgcgattggaagatcgagggtgaaccggacgtggagttccacgtggtcaagccggcgaccgtcgaacatacgtgcgccacaatcgtcaaccgcattccggacgtgctcaacgcgccagccggatatgtgacggtcgatcagctcgatgagatttcgtatcttacgtatcccgccgcgctgtacgtggcatagactccatattttcaaggatgaaggccggcactcataagggtgccggccggtatcaggcggccagagtcgacgtgcgtggcatcacctggaactggatatggtcatgggtgatgtcatcgggccgctcatgccgtagggtcgactcgatcggcgccaccatgcgatcgataaccgtacgcgccattgcggggacgtccatcgccacagtgctgatgggtgggttggcgcaggcggagaaggggatgccgtcgaatcccatgagccgtacgtcgtcgggcacgtggatgccacgttcggtgagttcgcggagcgcgccgatcgctatggtgtcagacatgcacagttctcatgctccccgctggcgggagctgtcatgcgaagcatgactgagggtggtccacagccgccaatccgtaacatcacccaacgcagcatttcacgatacggacgtttccgtatcgtattttcgtgtggtcaaatagacatttcgagcgaaaaagttcgaaatacccccataactggccataaaaaaaatgcttgagaatcactattgacttttatggcgactcggtatatggacacatgaaacgtaaatgacatggagcaacggtactgtgtcaacagcaatgaacgaagaggcatgattttcttacgtgcccacaaccaattgaggtgatttcggtgacattcaaagccccgctcgatctcacggtccacgctccggacggtatgtatgatcccgccaacgagcatgacgcctgtggtgtgggtatggtcaccactttgaacaagcgtcctgagcgcaagatcgtcaccgacgccattgaggtgctggtcaaccttgatcaccgtggtgccgtgggtgccgaggagaacacaggtgacggcgccggcattctgatgagcatgccggatgagttcatgcgtgccaccgtgcccgccgaactgccggaagccggtcactatgcagcaggcatcgccttccttgaccgcgacatcgaaacctccggtcagcaggaacaggccattgccaagatcgtgcgcgaggagggactcgaagtcctcgcatggcgcgtggtgcccaccaacccggacggccttggcctgcaggcccttgccgccatgccaggattcaagactctcgtggtcgcctctccggacggtgctctggccggcgtggacttggatcgcaagaccttccgcatccgcaagcgcgtcgagcatgaggtgggcgtctacttcgcatccctgtccgcccgtaccatcacgtacaagggcatgctcaccaccatgcagctcacccacttcttcgaggatctgaacgacgagcgcatgaaggccaccatcgccatcgtccactcccgcttctccaccaacaccttcccgagctggccgctggcccagccgttccgtctgctggcccacaacggcgagatcaacaccatccagggcaaccgcaactggctctccgcccgtgaaggccgcctgagcagcgaactgctcggcgaattcgagccgctgctgccgatcaccaccccgggctactccgattctggcaccttcgacgagtgcctcgaactgctgcacctcgccggccgctccctgccgcacgccatctgcatgatgctgccgccggcttgggagaagaacccggatctcgatccggacgtgcgcgccttctacgagtacaacaacacgcttatcgagccgtgggatggcccggccgacatcgtcttcaccgacggcacccaggtcggcgccctgctcgaccgcaacggcttccgtcccggccgctggcagctcaccgatgacggctacatcgttctggcctccgaggccggcgttctgccggagatcgcgcaggagcacatcgtgtccaagggccgtctcgagcccggcaagatgttcctggtcgacaccgccgaaggccgcatcattcccgatgaagaggtcaagaagagcctcgctgcccagcacccgtaccgcaagtgggtggaaggcaactccgttgaaatgagcgacctgccccgccgcgagcacgtcagccactccggccagtccgtccagcgccgtcagcgcgccttcggctacaccgaagaggatctgaagctcctgctcgctccgatggccaacaccggcaaggaaccgctcggttccatgggtaacgatgcgcctatgcctgcgctttccagccgcagccgcatgctgttcgattacttcacccagaagttcgcacaggtcaccaacccgccgctggattgggagcgtgaggagatcgtcacctcgctcgaatccgccatcggccccgagccgaacctgctggccgattccgagctgcacgccaagaagatcctcatcccgctgcccgtggtcaactctgatgagatggcccagctcaagcgtctcgacaaggcccgtatcctcggcggctactaccgcccgtacgtggtcaagggcctctaccaggtcgccggcggcggcaaggccctcgaagagcgccttgccgagatcttcgccgaaatcgacgaggccatcgccaacggcaagaacttcatcgtgctctccgaccgtgaatccaaccacacctggggtccgatcccgtccctgctgctgacctccgccgtgcagcaccacctgctgcgccgccacacccgtacgcagatctccgtggccgtcgaggccggtgacgtgcgcgagattcaccatgtcgcgctcctcatcgcctatggcgccgcctgcgtgaacccgtacttggccttcgaatccgtggaagatctggcccgtaacggctacctcaaggtcgacgcggacaccgccgtgaagaacctcaccaaggccctctccaccggcgtgctcaagatcatgtccaagatgggcgtctccaccatcatgagctaccgtggcgcgcagctgttcgaggctgtgggcctgagccaggaagtcatcgacgaatacttcaccggcaccacctcccgtgtgggcggcgtgggccttgaagaaatcgccgaggaagtggccatccgccaccgcgtggcctacccgaaccagtggagcgcgtccccgcaccgcaacctgcgcaccggcggcgactacaagtggcgtcgtaccggcgaggaccacctcaacgatcccgaggccatcttcctgcttcagcagtccacccagcgtggcgactaccagatgttcaagaagtattcgcaccacatcaacgacacgtcgaaccgactcatgaccctgcgtggcctgatgaagttcaacaccaaccgcaagcccatcgacatctccgaagtcgagccggcctccgagattgtcaagcgcttctccaccggtgccatgagctatggttccatctcgcaggaagcgcacgagacgcttgccatcgccatgaattcgattggcgcacgctccaactccggtgagggcggcgaatccgacgaccgtatcaacgatccgcagcgctacagccgcatcaagcagatcgcgtccgcccgcttcggcgtgacctccgattacctcgtgcacgccaccgacctgcagatcaagctcgcccagggcgccaagcctggtgagggtggccatttgcccggtgccaaggtcccgccgtggatcgccaaggtccgtcacgccaccccgggcgtggagcttatctccccgccgccgcaccacgacatctactccatcgaggatctgaagcagctgatcaacgatgcgaagatggccaacccgaaggcacgcatccacgtcaagctcgtttccgagttcggcgtcggcaccatcgccgcaggtgtggccaagtgccatgccgacgtggtgcttatctccggctatgacggcggtacgggtgcagccccgctcaacgccatcaagcacgccggcaccccatgggagatcggcctgtccgaaacccagcagacgctgatcctgaacggcctgcgctcccgcatcgtcgtccagtgcgacggcgagctcaagaccggtcgtgacgtggtcatcgccgccctgcttggtgccgaggaattcggcttcgctaccgcagccctgatcgtggaaggctgcgtcatgatgcgcgcctgccagaagaacacctgcccgcagggcattgccacccaggatcctgagctgcgcgcccgctttaagggcaagcccgagtacgtggtcaacttcttcatgttcatcgctgaggaggtgcgcgagatcctcgcccagctcggcttcaggactcttgaggaggccatcggccacgttgagtgtttggatcaggacgaggccatcaagcgctggaagtccggcggcatcgacctgaccaacgtgctcaagcaggccggcccggtacccggcacgatcctgcaccagaccatcgagcagaaccacgagctggagaaggcgctggacaacaagctcatcgaacttgcccagccggccctcgaacacaaggaacccgtgcgcatcgaaatgccgattcgcaacgtcaaccgtacggtcggcaccatggtcggctacgagatcacccgccgttacggcgaggaaggtctgccggacgacaccatcgacatgaccctgcacggttccggaggccagtccatcggtgcgttcatcccgcgcggcgagaccatgcgcatctacggtgaagtcaacgactacgccggcaagggcctgtccggcggtcgcatgatcgtgcgcccggaagacaccgtcaccttcgacaagcacagcaacgtcatcgccggcaatgtcaccggtttcggcgccacttccggccagatgttcgtagccggtcgcgccggcgaacgtttcggtgttcgtaacggcggtgccacgttcgtggtcgaaggcgtgggcgaccacggctgcgagtacatgaccggcggcactgttgtggtgctcggccccaccggacgcaacttcggtgcaggcttctccggcggtaacacttatgtgcttgaccttgatatgaagaaggtcaacccgggtgccatcaagtccggtgcactgctcttcaagtcgcttgatgccgaaacctccaagctggtgtacgcactggtcaagcagcatgccgaagagaccggttcccagttcgccgcggccctgctggaggactggaacgaaaccgtcaagcggttcacgcacgtagtgccgaagcagttcgtggccatgacgaaggccatggaagaagccaaggccaacaatgtagatttcaatgcgcccggcgcctgggaaaaggtgtacgagcaggttatggaaggagcgcgctgacatgggcgacccgagaggattcctgaaggtccgtacccgccgagagttggctgaacgccccgttgaggagcgtatcaaggactggttcgacgttcacgccgaaaccggcctgcaaccgtggacccaaacgcaggcggcccgctgcatggattgtggcaccccgttctgcatgaccggatgcccgctgggtaacctgattcccgagtggaacgacttggtccgtcagggcaagtgggaagacgcctacaaccgtctgtccatgaccaacaacttccccgaagtcaccggccgcatctgcccggccctgtgcgagcaggcctgcgtgctcggcatccaccagccgccgaccatgatcaagcttgacgagcagaccatcatcgaccaggcatgggatttggactacgtcaagccgctgccgccgcagcgtctgaccgaccagacggtcgccgtcgtcggctctggccctgccggccttgccgccgcacagcagctcacccgcgccggccacaccgtcgtcgtctacgagaaggacgacgccatcggtggtctgatgcgttacggcatcccgaacttcaagcttgagaagggtctgcttgaccgccgtgtcaagcagatggaggccgaaggcacccgcttccgcaccaacgtggaaatcggcaaggacatcacgtgggatgacctgcgtgaccgttacgacgccatcgtagtggccatcggctcccgcgtgccgcgcgatatgaagattccgggccgcgagctcgacggcatccacttcgccctcgacttcctgcccgacgccacgcgccgtatcttcggcgtcaagccggtgcacgacatcaccgccaaggacaagcacgtcatcgtcatcggcggtggcgacaccggttccgactgcctcggcacctcgatccgtcagggtgcgaaggacgtcaccgtgctacagatcatgccgaaagagccgtcaagccgtccggacaacagcccgtggccgaccttcgcccgcacctaccagaagacctcctccatggaagagggcggcgagtatatctactccaccgactccgtgaacttcgagggcaccgaagaggagaaggccaaggtcaccattgataactcgaccaccgccgaaggcttcgtggccgatgagcgtggtcatgtcaccggcttgaaggtcgtctccgtggctcccggcgaaaatggtccgttcactcgccagcctggcaccgagcgcgtgctgcccgccgatctggtcctcatctccgtgggcttcctgcatccggacaccgagaccatcctcgaccagctgcccgtcgaactcgacaagcgtggcaacatcgctcgcaatgacaagttcgccacctcccaggatggcgtgttcgtgtgcggcgatgccggccgtggccagagcctcgtggtctgggccatcgccgaaggccgctcctgcgccgcagccgtggacgagtacctctccaaggaaaagagcgagctgccggccccgatcaaggccagccagcgtccgatgatgctgcctcgctgaatactttccaaacagaaacatgaaaatcccttcttcgtgaggggatttttgcgtttctgggattaattactgccttgagccttcagtaatgtttatatttcgagaatattgcatacgtggttaacatgaagctcctatggtgtctttcgtcgccaaaaagatgacgccagaatatttgggagagattcatgaacacacgccatgtcacttcactggtcgcggccggtgcggcaatcgtcatgctgctcagcggctgcggatcgaccggtacctccaattccagcaatgcttcagattccaatatcatttccgtgtacggcagtgagccggcacacccactattccccggcaacaccactgaggccggtggcggcaaggttgtagaccagctgttcgcaggtctggtgacctacgatgcgaagggcggcatccacaacgaggtagcagacagcatcacctccagcgacaacgccacgcattacgtcatcaagctcaagagcggatggaagttcaccgacggcactccggtgaccgcgcactccttcgtaaacgcatggaattacaccgccaacagtgccaacaagcaggccagcgccagcttcttcagcacaatcgaaggctatgatgatctgcaaaagccggacgtggaccccaaggccacgctgagcggcctgaccgtcgttgacgacaacaccatcgatgtcaagctcagccagcccgactcggcattcccggtcaaggccggcagccacgcctacatgccgttgcccgaatccgcgttcaaggacccgaagaagttcggtcagcacccagtgagcaacggcccatacaagttcgtgtcctggcagcacaaccacagcatcgaaatggtgaagaaccctgactacaagggcaatcgtgtcgccaagaacgatggcctgaacttcaagatctatacctcgcctgattcggcatacgccgacctacgcggtggcaacctggacttcacgaacacgattcctgacaccgcacttacctccttccaatccgacaagtcgctgaaggcatacaacgagcccggtggcaatacgctcactttcaccattcctgaatggctggaacacttcggccagaacgaggaaggcaacctgcgtcgtcaggccatttccatgtccatcgaccgcaagaccgtcgccgagaagatcttccacggtaccgccacgcccgccgtcgacttccttgcagccccaatcagcgcctactccaaggaactcaagggaaatgaagtactgaagtacaacccgtccaaggccaaggaactgtgggccaaggccaacgccatctccccgtggagcggtgagttcggcattgcatacaatgctgatggcactgcgaagaactgggttgaggcaatctgcaactacatcaagaacacgctggatatcgatgccaagagcatcccgatgtccacttccgacgaattcctgtccaatgtggattcaggcaagatgacctccgcataccgtagcggttggggccctgattatccatccgcggacaactatctggtacagctgtacgattccagttcggccgacggcaagggcggcaacagcggcaactacaagaaccccgagttcgatgccatgatggacaaggctctttccgccccgtccaccgaggaagccgacaagtattatcagcaaggtgaggagattctgctgcaggaccttccggctatcccgttgtggaaccagaatgccaccgcagccagcacctccgcaatctccggcgtcgcattcgactacggcggcggcccagtgttcaccgcactgaccaagaagcagtaagcagtaagtaataaacagacagcgctagccccccgctggcgggggctgtcggcaaagccgactgggggtggtctcaaacagcagaccacccctaatcttgttatatgagcgagctcccgtaagcgggagcaatcgagaacatacaggagcacattaactatggaattcaccgtatccggcactaccgtgcgattcgatgaacgaacaatgcagttcgcttttacgcgcgacggtgccgaatggaatacctgcgctgatttcaagccgaccctgcaatgcgcgcaaggcaccttcgcgttcgcggatgccacttccatcacccatgagcagcgtgaaaccggcacgggaaccggcattcgcagcatcttcaccggctttgggcacagcgcatactcctttgaaacctatgtatgggtggagcgtgcctcaggcgatgtgctcttcgaatggattccgctcaatgagcaaggcctgaacatcaccaatgtgacgtggcccgcagccatggacttcgattgcgccgacgaccatgacacgacactcatcacccatgagcaaggtgtgatgatccccaacacatggcctaccgccgtgagcaccaaagatatcgccttcgacggccgcttcgaaacggctggcggttacatgccgtggtttgcgcagctccgcgcagacggacacgggtatatcgccatctgcgaaactccatggaatgccggttacggcatcgaccatcccagcaatggcccgtacacccatatcaatacttggtttgagccaagcctcggcacaatgaattatcgccgcgtggtacgctaccagttcctcgaccacgccgatcacacggcggtgtgcaaggcctatcgttcgtacgtcaatgaacgaggtcgcttgcgtacgctcgtcgaaaaggcggcgcgcaatccctccgtgcgtgacctgattggtcgttcatgggtgcacatcggcatcaaaaccaaagtacagcccgactcgtactactacgataaggaccaccccgagaaaaacgagtcactggtcaccttcgcacagcgcgaaaagcaaatgcgaacattgcacagcatgggtgcaggccgactgtacatgcacttggatggttgggcacagcccggatacgacaacgcacaccccgactatctgccggcctgtcaggaggcaggcggctgggaaggcatgaagtcgctggtcgacgcctgccatgagcaaggcgatattttcggcacgcatgaccagtaccgcgattactacttcaccgcgcaaacctttgatgccaacaatgcgattcggctggcagacggtacgatgcccgaacacgcacgctgggcgggcggccgccagacctacctgtgcgccgagctcgcaccggactacgtgcgccgcaatttcgccgaaatcgccgcacacggcatcaaactcgactgtgcatacttggatgtcttcacctgcaacgaaggcgacgaatgctcgaaccccgaacaccgcatgacccgccgcgaatgctttgaccgccgcgccgaatgcttcgaatatctgctctcgcacggcatcctctcctcgtccgaagaggtatcggactgggcagtgccaagcctgatattctgccattacgcgccatacgacttccagatgcgctcacccaacgagccgcgccaaggtgtgccggtgccgctgtataacctcgtctaccatgattgcgttatcgagccgtggatgatggagcgtgtggtggacggcgacgattacatgctgtacgccttgctcaacggcggagctccatacctgattcgcgatgccgcatacatcggcgttgacggcgacatggacgacgaacagcgcgctcgcacggaaaacgacatcgaacgctgccatacggtcgctgcattccatgagcgggtcggcatgcaggaactggttcgtcacgagttcgtggatgatgatccgctggtgcagcgttcggtattcgcggacggcactgcggtcacttgcgacttccatacgcaaacctatcgcatcaccgactgaaaatacaatgacacacagtgggttccgatggactggtggcaaattgccgccgacaagcgagtaatatagccaacagtgtcaccgtcgaaacaggagtagtgaaatgccgaatcgtgcagaacgccgtgcccaagccaaagcaggccgcaggggagtgccgtcgcagtatgaccagacccgtggccgcggtcgctcgggaatgattgacgaataccagctgcagcagaagtcccagcgtctgcaggacggcaccgacggcaccgaatggaagcccagcggcggtacgattgcggacaccgaaaccctgctgaccactaacccgaactacacgaatccgaagatgttcaaggcaccgcattcgctgcgtcagtggttccgcgtgggcagctggacgctgatcgccatcgcgattatcgcgttcttcgtggttatgtggctgccaagccatccgatgtggctgatcatcaccgtttccgcggtgttcattgtgggtgtgctgagcctgttctttacggctggcgattccaagcacaatccgaatctggaccagaacggcacggccgtttgatcttttgcccggtaaatccggcttgaaaagcaaaacgcacgacggaagttgtgcgttttcttgtatgcggtgccctaaagtaagaagtgcttgagtttctttctgacgcacgaaggagaggcagtccgatgaaagttgatattctaacccgcgaatacccgccgcacgtgtatggcggtgccggcgtacacgccgaggaactgtccaaggtgcttgccgagcgcatcgacgtaaccgttcgtgcgtttgatggcaagcgcaccgaggcggacattcctgctatcccgaatgctgccgatgctaagggcagcttgaaggtcgtcggctatgacacgccttctgagctggctgatgccaaccccgcattgaagaccttcggcgttgatttgcagatcgccaatgatgtggacgccgacatcatccacgcgcacacctggtatgcctgcttggcgggctacatggccaagatgctgcacggcactccattggttattaccgcgcactctctggagccgttccgcccgtggaagcgcgaacagctcggcggcggctacaatctgagctcctgggccgaaaaagacgcgtacgagcacgccgatcgtgtgatcgccgtttccggtggcatgcgcaaggatattctgactgcttacccgaacctcgatccgaacaaggtggttgtggtgtacaacggcatcaccatggccgacttcgctaccccggcaccagacgatccgggttggaaggtgttcgagcgttaccacatcgaccgctcgcagcccaccctgctgttcgtaggccgcatcacccgtcagaagggtctgccatacctgctcaaggccctacatctgatttccaaggacattcaggtggtgctgtgcgcgggagcgcccgacaccccggaaatcgccgaagaggtcaagaccgcgttcgccaagctggatgaggagcgcggcaacatcgtttggattgaagaaatgctgccgaagtctgagctgaatgctttggaacacggctgtgatgccttcatctgcccgagtatttatgagccgctcggcatcgtgaaccttgaggccatggcctgcggtctgccggtcgtcgcatccgccaccggcggtattccggaagtcgtggtcgacggcgaaaccggctatctggtcccgattgaccagctgcacgacggcaccggcacccccaccgatccggacaagtttgtacatgatatggccgccgctatcgacaagatcatggctgaccccgaactcgccaagaagatgggccaggccggctacgaacgcgcccgcgacgtgttcagctgggagaccatcgccgacaagaccgtggaagtctaccagtccgtgctcgacgagcagaagaagtaagtagcgctgcaacgagtgccccctcagtccggctgcgccggccagctcccctcagggaggggagccagaatattgtctcttggctccccttctttgaggggagctgtcaccgtaggtgactgaggggagtcatatatcgtgtttcttggctcccctctttgaggggagtcgtccgcgaagcgtactgaggggagtcctcagatcgcgaatcatagttagtatttcactcatgacaaacaccgtcctccaactcgacaacgtcgaattccggcgtaaccgtcgcgtcattatcaccgacgtgaacctcaccatcaacgcgggggagcgttgggtgctgttcgggccgaacggcatcggcaaatccaccgcagtcggcatgctggccacccgcaccttcccctcggaaggccgcgtgttcattctcggccaccagctcggcaaatacgacgtattcaagctgcgcacccgcatcggtctcgcctcggccgacctgggtcgccagttccccgagttcgaggacccgctggatgccgtggtcaccggcctgtccgccgtgaccgggcgctggcgcgacacctacacggacgaagaatacgcccgcgcacgccagctgctgcgtgatttccgcgtctcctatctggaaggcaaggagatgtggcgactgtccgaaggcgaacgcacccgtgtgctgatcgcccgtgcgctgatgggcgatcctgagcttttgattatggacgagccgaccaccggcctcgatctgggcggccgcgagcaggtgatgcgcacgttgagccgaatcggcgaggaaagctctgaacgcgccgtggtcttggttactcaccgtctggaggagattccggcaggcttcgatcacatcgccattatgggtcgcaagccgattcccgccgaagatgccaccgaagcgggcgtcgactcaatgggcaatcccggtgctggcaccatcgtctacaccggtgcgctggaagacggactgaccgacgagcgcctgtcggaattgttcggcatgcccatcgaagtccagcacactcacggccgctgggccgcctacgccgtgtgatgccgttttggtctccgccagcggaagccgtcggccaagccgactgggggaggtgtcagcagtactttccctttttcggcaggttttatttttctcttcgccccctctggaggtggctgtcagcgtaagctgacttgggaaggttcgacatatgacggaaagcgacatgactagtagcaaactcgtattcattgatatcgacggcacgctggctgatgagaatcatattgtgccggagtcggcaaaaacggcgtgtgcgcgggcccaagccaacggtcacaagctcttcatctgcaccggtcgatccgtgccgaaaatcgaacgcaacattctggatcttggattcgacggtgtagtttccgtagccggcgcacaggcgaatatcggcgataagctgctgttccagcacctcgtatcgcccgaagccatcgatgcggcgatggcctattttgccgaacaccatatcgagagctaccagtggcagggtgcggacggcatgtacatttccgaaggttatcgccgccatctggagtccaagggcaagacgtggaatcgtggtgagtttgcgcggttctggcatttgctggacgaggtagaggttccggctggatctacgctgggtcacacgattcatgtgagcaagggatcgtatttcaccgggcccgagccggatgtttccttcgagaacactcagcatgatcttgccccctggttcgaactcgtgcacggctcatacgacaagatctcgccgaataacggcgaactgctcatcaacggcatcgacaaaggcaccgccgtgcgcgacgtggcttccttgcttggctatgccatcgccgacaccatcgccatcggcgactccgataacgacaccgccatgctcaaagccgccggcacatccgtggccatgggcaacgccatccacggcatccaggccttctgcaacatcattaccaccgacatccgcgacaacggtctagccaacgccttcaagacattggggctggcgtgacgagtgcgaagtccttaccagttgcgattgcgcaatttacggtggcggaggagccggaacggaatctggagatcatcgacggattcgcgcgtgatgcggcggcgggcggcgcgaagttgctggcattgccggaaggtttgattgcgcggcgcggcgatgacgattcatatgctgccgcgcacgcgcaaccactggacgggccgtttgtagacggcttgcggcgtatcagcgcgcagcggcatattgtgctgatgggtaccgtgcatgttgcgccggagcaagtaacagaacgggatgcagattcccgagtttccaacacgttccttgtgattcgcgatggtgaaattatcgctgaatatcgcaagctgcatctttacgatgcgttcgcggcccgcgaatccgacgtggttctcccaggagatgcgttgccgcctatcgtcgatattgacggttggaaaatcggcgtcatgacctgttatgacgttcgtttcccggaaaccgctcgctcactggccgtgcgcggggcagatgcgattgttgtaagcgccgcttgggtgcgcggcccgttgaaagagcagcattggaagctgctgactgcggctcgcgcattggaaaacacttgctatgtgttggcttgcagtgaggtgagttcgcggaacatcggatgctgtcgcatcatcgacccgatgggagaggtagttgccgaagcgggcgatgagggagccgagcttattgctactgggcttagtcgcgaatgccttgcttccgcacgccagataatgccggttctgcagaatcgccgttttgccgacccgcagttgcccgattagtcgagtctttcagagcccgctgccgacgctttgatggcatattactgtcgaatataacgtgccgaattattgacgcaatcagtggtcatcgaaagtctgtgatagatgtcgcgggctcggacgcctatcatgggacgcatgactgctactgttcatgattccgcccaagctcctgtatacgctcgtctgcaagaggggagtgatgctcctgatttcactctgccggcgattgtgcccggcactgcggagaacggcttaatcaatctgtctgacgtgctcgaggacggacgtagggttgtactgtacttctatccggcggcaatgacgcccggatgcaccactgaggcttgcgatttccgagataatctcgcacgcttggagtcgcagaatgttgcggtgctcggtgtctccaaggattcactcgagaaactgcgcaagttcgccgagcacgaccatctcacattcccgctgctgtctgatcccgacctgaccgtgcacaagctgtacggcgcatatggcgaaaagaagctctacggcaagatacacgtaggcgtgatccgttcgacgctcgtcatcaatcccgacggctccgtggttatcgctcgttacaacgtacgtgccaaaggacatgtcgattcgctgttaaaggcactggaaaagttggagaagctggagaagtagtgcgttctcgttgttcggacacagtggttcgtgctgcgctccgcgcggtatgtgccgtatgaaccactgccgtatgaaccaccggttgacctctcggactcaccggcaaatagtgagaccgtgggcgcgcagtacgtctatggctggcatgtaatcgagcgatgttgcggtgggattgagcatcagttcgcggatggcggcggatgctgaggactcgcttgtcttcgaggattctgcggccgggaacagagcgtcggcgattagggagatgatacgggaacgtgcatcgccggcattggcattgttgctgctgttgccggcgtcggcagtggcggagctgttttgtagagtcgtatccaacgctgtgacaagcggctccaggttgttctttgtcgcctcggcaatgtcatcgagctgatcgaataaggcgaacagccatgcacggcgttgcccctcatcgttgccggtcgcaagcctttcatcggtgacgcgcacgagttcatcaatcggtactgctggcgtctttgccggatcgcgatgctcacggttgtcttcgatatcgcccataagatgctggatcttgcactcgtcctgcaatacggtggtctcggcaaatgcggtggcgatggcgtccgcatcgatgaacttgccaccctcggactggaagcgcacgcgcttaggctcgctgtaataatgcgacatgccgaatgtgatgtactgaggcatctcatcctgcagctgtttgaccgccgcggccaccttgcgcatatccgccagatgttggtgcaccacgatgaaagcgagcagtgccttggcgtcggcgagcgtgagcggctggccaatgcgggtgccatgatgctcgtgatgcgcgaacatgttcttcagcgaatcaaacaatcccataatgtcctccttcgaactgggcgaattaactgcatctgccattcacactagtccggaatgtatgagaatcatcgtggaacgccgagagcgaattattgacgctgcacgcagcaacgtgagaactgaaccgacaccaagaacacagggcatacctgcagcatgtcgagcaatgcgatggcattatttgttaagagctcgaaaatatcgcacaggacgtagaagtgcttgtccgaatcatgtatggcaagaaggctctacagtttgcttgtgaacgactccactggctaactggtagagaagtagcggtttggtatgcgcaaacagtgcgatcggcgatgaagatgactgtgaggttgtcatgtgtattcctcagaacgatgagcaagacccatggacttggtgcgtaatagcaaatgtcgtagatgagcatgaggttggtgttgaccatcatattgggcatggaacgaagatattcagtcctggaacaaaagtgtatgtgtcgactgaatggaggacgagcctaaaggatgacggtggaacattgtttgtgattgggaaagcgcgtaagcaatggcgaatggtaggtatgttcattccacgtaatcgactgacgaactttcgagttggacgagtattcgatccacgtgtactgcggcgtatggctaaggattgcaggcaatcagtgccagatccgtctgaatggggttggcgctggtggggcaatgatgaggatgcccaccaaacagtcattaagagggttgaatacttcagtcaagatggattttcgttgccagaagctggggctgaagatgattagaatcaggtgagtaacacgatgctgaagaattctgatgcgtctagtctttcttcttgagggaccttccaccgccaacaccgcgaccaggacggcttgcattccaatcatctattgttcaggtagctaacctttagtagtgccatatatacgtcaggttccggcagcttatatactgatgcgttcttgacgccgaggcgctcgctaacttctttggtgctgagaaacctaagtgccatttgagttcctctcatcttcgtggagatttcagtacgtcggtatattgagcatacctgcatattagcgaggcaaatcctctagtgaattgagatcttgactcactgataggcggttagtgaagcgattctgcggttaagtcgagcttttgcttcgctgagcagtctcagtgaggcaaatcctcgggcggaccgaggcattgctctactaaaaggccgcttagcgaggcttttcctctactaactctctgagttgcttcgctgacgacgattcagcggggtattctcttgacctatccgtgttttcgctctgcaaagtagttctgagcggcggatcgatactcacacagatgtgtacggtgtgctgtcagcgtctttgtagtttcgccggtcggttgcttggtaatccaggataaatcagtcatggttcctcgcttccatgtgaggcggtacacttgggtactgcctctattgagtgcattgataaaggtcagccccgcaagtattgctagtgcttgcggggcatttatgtagcggcagtgccgccgtcgtgcgtagtcagggactgcacctgattaagccgctaaccggcctacgctcaaagattgagtagggctcacaactagcttgcgctagtgttttcttttggcttctcagcctctaacagtttgcgagggttactgaccttgagcgcgtcacataacttgatagccatgccaagactcatattttcgataggtcttgaaccagtctcagtcgcggcgattcgcgtgtgcggcacacctgacttgtcagctagttgacgctgggttaacccgcgcttctgccttaactccctaagactcattacccacctcgcttatgctcagtgggcccgattatacctatcgttgaaacatatgtagagtgaggggcataaatcgaaaggcgtcaatgatgaacggaacattcgagcagttaagagcagccgtgtatggccaagcagtcggtgatgccttgggcgtgccttatgaattcatgccgagagataccttccgatgcgaaggtatgacgggatacggtacgcataaccagccgattggcacatggtcggacgataccagcatgatgctcgccacattggactcgctgatcgccaatgaatggcaagtcaatactgaagatatgcgagagcgatatctggcatggctgagtaatggcgaatacacgattgacggacgagtcttcgattgcgggcgaacggtctccgtcgcgttgcagcagcgtgtgggcttaagcggtgaacgagacaatggcaacggctcactgatgcggatcatgccgttggcgttcgcggatgcttccgcggatgacgtacgtgccgcatctgcaatcacgcacgcccatgcaatctcgatggatgcctgttcgagcatggtggatgtgttgcgcgacggactcatcaaaggcatatggccgcaagagctggatgatgaaccgttacgcggtatgccgcgtgatgaagttggttcgagcggcttcgtcaaagacacgtatgaggcggcgctctggtgcctcgcgaataccgatgattatgcgagttgtgtgctcgccgccgtcaacttgggtgacgatacagacacgaccgccgccgtcgccggatacctggccggcatcaaatatggattcgatgccattcccgctcagtggctggcggtattgcgcggacgtgagcttattgaggatgtgcttggacggacggagtcggcgtggcattaaggcgctcgcggtgagtggcaacctactgtttctgtatgcgatgaagatggccagtacgccaccatcaacagtgaggactccctgcctactgttctccacgatcacgcccaagcactggacgctcccatgtctcgttccgctgaacattgccgagaactcccttcttctggatgcgcatcatcgaatcccacttgctcgacgcccagactgctttggacggggatacgccgctagtgggggacagagattgagacgcattcgggttcgaatagtgtgagggatttggctttgccaacggttgttggacacattccatacggtggtgcctgtgttgttcgcaaaagtatgtctatctaatcgttaatcgaggatgacgatatggtgagtttttctgccgctataatgtaggattattaacaggttacggctgaagaactgattacagtattagaacatttttttctgatatatgtggttggcgtagatgtggcatatgcgagggggcatcctatggcggatgatgaaactcatatcggtcgaaataacgaggaacgcaaggaagacgaaaaccgtcgcattatgggaaaggcgctggaaggtgttgcggcggaaaccgtgcaacgctttggttctgccatcaaggaacatttagcggcctatgcgggtgatagagagaaacctgctgatgagaattccagacctcctaagaccttgaagtccattgctaagatggagactagcaatgaattcaaaaagcagaatctagctcagcaagcgggttttagtgccgaggttgaggcggtagccaggaagaacgccgataacatcattgctggcaacgatacgcgattcaaacgatatgatgacgtgaagcatccagatggacggcaagtgtcgaacgaccccatcgtggacattgtcgaagtggatgacttgggcaaaccaatcatcggctctgaggctcaaatgaagttcgtcggcagtagcccgaaaaagcttcttgataagttgaaaagcaagaaatatgcaaaatatcgtgatgcagacgtcagcatggttattccggatgattattacgatgtactgatgggtgatgggcctgacggcatcaacgaacagatacgaaaacttcagggcgagctggatggaggtcggcttgccggcaagaattctgaggctattcagcagcaaatcgatgatctgaaacagattaagaaaagcctgcggaaaagtggactcaccaagcgagaagcgttgtatgcgcgagaacatcccagacgcatggtggcgaaagatgtagccaaagttgccaataaagccgggttgcagcaggcaaggaatggtgcgctgattggtggtggtgtttctctgattcgaaatatggttgcctgcattaatggctctattgagccagcggaggcagcgagaaacgtcggcgtcgatgcaggcttggctgcggcgttcggctatgtcaccgctttttccggcgctgccattaagggtgccatgcaaaacgcgtcgagcgagtatctgcgtagtctatcgagaacgaacgttgcagctacgatggtctccactgtaacggatgtttccaaggtggttgcactgtattgccgcggcgagattactggagctgtttgtatagagcgcctcggccagcagggaatggggcagctcggaggagtgatgggcgttgccgtggcgatggccgcaatacctgcagatggtgcttttatggctgcgatggttggtatggctggaagcaccttgggatatgctgcagctgttgccgtatatgaggaattatccactgctctgcatgactatgagctggcgaaagaggagcgtattcgtgtggaacgcgaatgtgcggaagcggtggagctcatccgccaatataggcgtgatatgtctagggatgtcgagaattatctggcgactcatgatgaattgtttaatagagcattcgatgcaatggatcaagcgttgatttccaatgatattgatggatatttgaccggaaacgccgaaattcaagaatccttgggatacttgccaaggtttcggactcagcaggagtttgatgatttgatggcgtcagacgacaatttcgttttataaggaggagccagttaatgaagtacatcaaaacacgtgatgcattacaagcattttattatctgattgctgtcgatggatcagtccgtgacgacgaacgcgcactattcgatcatataggtgacaatttggatgcaaagcacttccatgattatcgcaaagagattatcgattcgtgcgatgagcgtataaaccagtgccacgattccgatgatcgctacgacgtaattgttgagggtgttgatgcagtcttgtcgcatcgaacggataaaagagctgcaggaattgcaccaaggctgcttctgtggaatatgttgtcagttgccttcgctgatggggaatatgatgcagtagaaagcagactcatcagacatattgcccggacgatgattgccgatcgttccatataccccgaaatggaacatcttatgcgcgcggcgtatgacgtgcgaggcgagctcgactggatcagcaattccgaactgccatatagtgaagttcgccccatggtggatcagctggaagagcgcgtgaatgttctccaaaacgctgccgtgttgctgattgaagacgagacggccgcgccagccccggaagtcatggttccagagaaggacgtgtttgatcagaccaaggatgccgttgactcggtggtcgctccggttgtggatcaggttcagcagggtgctcagggagccgcggatgcggtgaagcatacgtttgacgataatgttgctcctgttctcaaccaagttggcgatgcgctgaagccggtgaatgatgcagtgctgaaaccggtaggcaacgcagccaatgaggttgcgaaacgtgcgggtgacgcagccaatgaggttgcgaaacatgcgggtgacgcagtcaatgaggctgcaaaacgtgcgggcgatgcggcccatgctgtacaaggcttcttcggtggcctctttggacgcaaataagagaaacccaggaaggaattcactatgccattttttgttgttccactattcatcggaatggccgctgctgccggtaccgcaggcgtgggtatggctgccaaaggtagtcttgatcagcacacggcgaatcagcttaacgacaattccggagcacgcattcgatgggcagctaataacctcgaaaagcttcgtgggcaatgttcagattccctgaatgccttgggcaaagagaaagtcattattttggatgggagcgttcagcgcttccttgatgcttttcaacagctgaaaaatgttgatttcaccgcgtccgaagggcttgatgaactcaataaactgcgcatagacaaagcggcttttgctgaacttaaaaccatgggaaacatagcttcgtctttgctggaaggtggtgtgaccggtgcggccagcggtgcattggctgcgtttggtgcatatagtgccgcgtcggcacttgccacggcttccacaggaactgcgatcagtgcattaagtggtgtggctgcttccaacgccacgttggcgttcttcgggggagggtctttggctgcaggtggcttgggcatggccggtggcgccgctgtacttggaggtttagttgcaggtcctgcattgctggtcatgggcgttatcatcggtgccaagggtggcaaaaaccttgaggaagcgaagacccagtctgctgaggcaagcaagtattgtgagcagatgatggccggtgcggaccagtgcgttgccattcgtcggcgcagttatatgttccacgctttgcttgcccgtcttgatgctaaattcctgccttcaattcttgaaatggaaaatatcataaagaccgagggaacggattattcgcaattccgtcaggaaagtaagaagactattgccgcagctgcgtccactgcagcatcaatcaaggccgtgctagatactcctctgctggccgaggatgggtcacttactttggagtcggagaagctgatgaagaacagtggcatgtgatgggatgaggattccggagctggactgatggttctgtggcttcttccgttgattttgggatatggtgagaatccgttgcccgagatgacgagtcttgcggaagctcatggcattcgactatttagtctgccgactgtcggacgagacgtggatgctttcagttttatgttcgatggtgtgccgtatgtggcggtagataccagtaagactgcagaacgtgtccgtttcgatattgctcatgaaattgggcatctgatgatgcatgaaatggtgtctgaagatgtggctattccgtctttgtcgacattcagaccttgcgactttcgaccatgagggcttctcatacccgaatccgagcttaagaaaagccatcacggaaaaacgtgatggctatgcgttttaatcaccattcaggtaagctgtctcccgaccaagggtgccattcaggcaacttgctgttggaagcatcggcaattagagcaaattcatgaagttcatgaggaagcaatatcggagtctggctagttggcttcagcagtaaatcccatcggtctttgtaatcgccgaaaaccgaaacatccatacgggcttgttcaggcccgcaatttcgatttcgcttagcagtgggatcggtcagccatctcatatgtcccaaccatgctccagcagatacatgattccgaggaacaatatagctggacagggtctgctcgttttcattccatccgaccaagacgaaccattcatacaagctacgttgagagccgatcttggcagggtttaacgcccatctttcattgcgggaagttttgacctgcacgctaatttgcgtgacatcaaaaggagcgtggcttctctccgcaagtatgtccgttcgttccagaccgtctctcgttagtgctggagcccaaccattcatcgccaacttacagcacgtccaaaattctccgaccgactttactgctttagtatctgaaaccatagcgtcctccttgactgcaaacagctacctcatattagaatttagtcccaatcttcaacaaatgtaaagttgcaacagtacatgaccatgtttgctgttctgatggaggtgagaggcttctagacaaaatgggaggtaacttaaacctcttcgagaaccttcagacctgcggtttatcctaaggcagcaaactcattgtggaacaggtccatatggcttacattcgtttccccatcgcttttcccggattcaacttgtaagtgcaacggctggtttcgggtcggcttgttttgattgtagcttggccatctcctcgtcccatacctcgttgggcgttttgtatccgaggagtttcatgggggtgtcgttgatctccccgacgatcgcgtcgagctcgtcctgcgtgagatcctcgaaactggttcccttgggcagatagcggcggatcctgccgttcctgttctcgttgctgccgcgctgccaggagctgtacgggtcggcgaagtacgtgagcatgcccagcgcctcgtccaccagcacgtgcagggacgcctccgtgccgttgtcccacgtgcggtcgacgcgcgcggccggcgggatgtccttgaagatctcgtattcggccctggccgtggcgggcgcgctcttgtcgtcgacgagccgggcgaacagcctgcggctcctgcgctccacctgcgtgttcatgcagcgcctcgacggcgcggcgccgaccaccgtgtccgactcgaaatggccgaaccccttcctggatccgaccgcctcgggccggtccgcgatgggcacgcgcatcgggatgcgcggccctttcgccttcctgccctttttcctcgtccggcgtttcctgccgcgcgccaggtactggcgcaggtccagcgcccgctgcggcttggcgtagatccactggtaaaggcactcgtggctgatccgcatcgacgggtcgccggcgcactgggccttcaaccgtccctcgatcagttccgggctccaccccctgcgcagcgcgtccagcacccaggcgcgcaacgggcccgagtccatgcggcgcggcttgcgggatccgcgccggcgcagggctgtatttcgtcaagtcggtgtttcgtgtttagtcatgtatttttttcgggtttaggcagttgcatgcattttccttatttttccggttgcgcggaggtgttcctgccgaacatgagggcctcactgacgcggcggctctggccggtgaactcgaggagccgcccgtggtgcacgatgcggtcgatgatcgctgcggcgagtttgtcgtccgcgaagaccgtgccccatttactgaactcgatgttcgtggtgaatatgatgctccgtctttcgtagctgcccgcgatgatccggtagagcaggcgcgccccgtcgatgtcgaagggtacgtagccgaactcgtccagtatgatcaggtcggcacggccgatgtcccggagcatcgtctcgagcgtgccgtcgcgtttggccttgcccagctggaggacgagctcggcggtctgatggaaccgcacgcccagccccatgtcgatcgccttcatgcccagcccgatcgcgagatgtgtctttccgcgcccggtcttgccgtagaacaccaggtcctgcgcgcgcgggatgaaaccgagccctaggagctcatcgagcatgtagccgtcggggagcctgacgttcgtgaagtcgtagccgtcgagacccttgacgacggggaaccgggcgcggcgcaggagcctgtcgtgcttcgcgcgttccctgttcgccagttccgtgtcgagcaggcggtggacggcgtcgacctggcggggcgtggcccagccggcgaattcgtcgatgctcgccttggagatgaacagcttgcgggccttctcgtagagcccttcgtccgtcttcgtgttcatcgcccgccttcctgcacgccgacgtccgcggtgaacgcgatgtcgtattcactcagatccggcctgtcatcgtcgtattcgatacccgccacgccctcggcgagcctggccgcgagcagtgtgacaccggcgcggtccgccccgccggtcgattcgaggatggaaagcatcgcctcgaccgcgttcgcccacccggattccctgtcaacgcgtttgagggtctgcagcgcctcgttgcgtgtctgtctgtcctgccgatccagccattcccgcaacgggtccggcaacgcgtcacgtacccggctgttgggccaggacgcgggcttgttgcacagcagcgccaactgcatggacgggtcctcgctgttcgtgctggcctggccgtacgcccgaggatgggtcgccagatgcttgcccgacgagtcgaggacctcgacctcgagcgcgcggaggcccacgatcacccctctgcccgcgttcgcccggtccgcggaataacgatgccgtccccgagcgtgaccacgccgtaccggtcggccttcatatgccgccacgtgaccacgtcgaaacgcttcccgggcaacggcagcagcgccgcacggtcctcggagaacaggccacgttcctccgtgtccttgcggtaatgcggtttcgtggccagctccaggcaccggtccggcagcccggcgttaaagttctccaggctccatacgctcggccggggcacgaacagcttgcgccgcaccatgccgaccttggactccaccgcgcccttctcatgaccggaatacgggttgcagaacgaacaatcgaacccgtaatgcgcctggaaggcctggaacaggtgcgtcaggcgcggctcgcgctccccgtaccccttatggcccacgccggcggcgttatcgaacacgatccgctccggcacaccgcccagccactcgaacaggttgcgcaacgccaggcacgtgcactcagcgttctcgcccggcatcaactgcaccagaccgacgttcgaatacgggaaatcaagcacgaaatgatgcatccgctgcaccacgccgcgcaacagcacgtcgacctcgccgaaatcggcctgcgcctcgcctggatgccataccagatccatgaacgcctcatcacgctccgccgcgaactcacgcctgagccgcgccaccgcccgcgtcaccgtggacagggagacctccgcgccatgctcgtccctcaaccgctcccagatcctggtcgcggtatgccgctgcttgcgccagttcgcgcgatcctccgcgagccactgctcgatcacgggcagatacgggtcgatcaccgacgcgcgcggctttctcaccgacggcacggccgacagatcctccttcgcgaggtacttacgcaccgtcggctccgctgacatgtgttttccgcgcgatcgacgcgacggattccccgttccgccgcaaacgacggatagactgtacttggggcatgctgatcataatcctttccggtcctttctggcggagatacaagcaccatccagttaagaccattccgtggtcggcatgctctgcctaaacccgaaaaatcatcgtgactaaacccgcaacaactaattgaacacaaacacaggtccgccttcctctgcgcggccagcgccgaatagaacggacccgaggtccacggcccggtcttcagccgtttcggccggtaggggcggtacgacccgttctcgttggacgcgaaccacaggccgcgcctcagctcgcggctcaccgtggacttgtcccggccgatcctctccgcggtccgccgaatgctcagatgctgttcgcaatgcagcttctcgatcaggatcctctcctcggacgacaggtgcgaatactgttgacccatgagtgcgacaccttcttaagttagaaacttcgaacacttccaaccctagacaaggtgttgcacttctatttagaacccgggtttccctcttccggaacgggattatgctacaattttcgtgtcaaatgtagctatcttcaatcgatcttcgagcagcagcttatggagaagattccttccgtgcgcttcgggtacgatggtctttccgtattctgtcatcaatcgaatgattgcatcgtagttggcaggatacgacaacgtaccgaagaaggtcagtttagtttctccgccgtataagtctatttggtcaaatagcgactggaagtaagagtaatcagcttctcccaaggaatggccgaaaaacttgacttcagctatgtcgctgccattgctttgtgcgtcgaatattgagcgacctgccatttcccctgtcaaatactgtctccgtaatttcaacaccctggcggtttttgtaaattgatagacgccaggctcatccatatgagcctggccatcaatgccaaatatgacgtgataatcatagcctccgtggctttcatctgagaagcgatcaacgtcaccatgcacgttgcggtgatagtaaatggactcttctcgcgggctctgaagcagcggagtcgtgtagttgaaggatagaatgacgttcgattgctcatcaagtggaatgtcagttccggtttccgccattgctttatagatgtttctgctgctagaatcatatgagggattaccctggactcgtatcaggtatcgagtgaaggcgtcttcaataacgtgaagttctttcgcgaaaaagtcaagcagtttcacccggagaatttccactggatcttctgaaccttcgtcatccaaatccgctgaagtgttgaagtaattaagtacagaaaaatcgatgttactcgaatgctcattaacatacttctgaatttttagatatgcgttgaccaccgcatcaggacgtgatggcttcactgagaggatggtccagtaatttagagcatcgttaaggctgatgctgcctttcccgatgacccactctttgattgcgctttccacgtctttccaatcatcgagttttttcgatgtatcatgccaagcaatgaaaaggtagtcccacacgcaggggtcctcgacattcacttgataggtgactcttggcataatcgccttcttgaagctttcccgatacttcgtgtacctatctcggaagaaagcagaataagacgacgggatatgctgtgccaaatcaaacccgttacccaaaactatgatctgcgaatacgtcaactgaggcctttcctctggagttcaaaacaagcttacatctccttgagctcttgcgcagggatggcggtatcgaacagactgatctgtgtgtcctgttcgtacttgtcgatgctggtggagaagagatggattgtcctcataatgcttgaacttatacatggtgtcgttcattatgttgactctatacatgagtgtggttctgttatcttacgccggcatattcaattgtacatatctacatgttacagtttttttattgcattacttcgaggtttgaattttgtggttctcagatatacatgaaaaagtcgataactttttgcgaagatgcgtataggtgcatgacatttgccgatgtgagttgaatgagaaaggtgagtgtcggacatgacaacaattgggcctttcgctgtttgtgatgggtggctgtggtgtgaggtgttgccagtcggatggggttggaggcatggatgtattgcttcaatgtttgttgggcgggttcggcagtgtttttccgcagtgtgggctgatggttttccccggtgccgtcatcgtttcccggtgatgtgagaggcatcggtgccgcggcctgtatattcccgagttgcgattcgaattggattcggccggttgccgccggccggcgctcgggaaggaaaggatcatggcgataccgatgcccattgtgcaagatatcaggagactcgaccggcaggggctgtcgcgcgcgcagatagcgcggcgtcttcatgtggatcgcgggacggtcgcgaagtacgcggatatggaggattgtgccgaggacgccaccgacgacggcatcgacgcgatgggcaatccctccgccggcaccatcgtctacgccggcccgctggaggatggcctgaccgacgagcgactctccgacctgttcggcatgccgatcgaagtgcagcacacccacggccgctggtcagcctacgcagtatgacccccggcccacgccccgttgccggaggctgaccgagccggatcgtgagtcggctcatgctcccgccagcgagggcgtgaaccgacgaaccattcctctaggcgaatggtcgggacagcatagccgaagtacgctgtcccagctgactccatccctcactcgtagctgatgaccagacggccgaccacgtcgccgcgctccagtcgttcgatcgcctccggcacctcgtcgaacgagacggtcgtggtgaccggcgtgagcttgccggtgcgcatcagctcgtagacgcctcggatgtcgtcgggcgtgccgccgttggatccgcgcagatcgcactggttgacgatgagcgacttggcatcgatggtggtttccaaccggcccatgccgacgagcaccaccacgccgcccagcctgatcacgtccaccgcgtcggcggtggtgtcgccgaatccggcgaagtcgacgatcacatcgaagaatcccttcggatagtccgtgatggactggcgcgcgtccaccgcacccagttccttggccagcggccagatatcctccttgatctccgccacatgcacctcggcgcccagcagatgggccacgcgggcgccgatctggcccaacccgcccaatccgatgatgccgaccctgtcgccggccttcacgccgccacggcgcaccacggccgcgtacgaggtcatgcccgcatcggtggccgcggcgccgttgacgaaatccacctcgtcgggaatgcgcaccagcgcctgcgtgcccaccacgatcttcgggccgaatccgccgtcgaaggaggacccggggcagccggccggcgtggtcgggcatatcgccacgcggtcgcccacctgaaaatcgtccacgccctcgccgacttggctgatcacgccggcatcctcgtggccgagcgtgaccggcacctgcgccagcatcgtcatccagcccggatcggtgagaatgcccacatcggtgtggcagatgccggccgccttcacgtcgacgacgacctgccccggtccggcggtcggctcgggcagctcggcgagctgcaatggttcattggtgccggtgaatctccatgacttcatcatgactccttaacttcaaggcgcatcgtcgcgccattcggccgagcccctcgtcccgggcacggactgcgccgttgggaatacggcgacaccctctatcgtagggcagccgggcgaacgacccacgcggcccgttgtctacttagaagtgcaacatcctttttaaagggtgttgcacttctaagtagacaacgggatgtttgggtcgcactatctgcccaaaagcatgatgtgttcagctccgctcacgaatgaaatcgaagatcacgtcgaagacctgctggctccagaaatcgtactcatgttcggcgccgtcgactagcaccagctgcgcgtccacgccgtgctcgaccagttggtcgcgcatcttgacggattgatgataggggaccacggtgtcggcggtaccgtgcaacaggagcatcggcggatactgctggtcatcccgcacctgcaggtagggactcatatcagccgcacgctgacggacctcggcattgatgccggtctcatgggtcgcacccaccacggccgcgaacgggccgaaataatacagccggaatggattggtctcatcgtcgaatgcggcgacagcttcaagcatgtcagtgggcgggaagcagctgaccacgtacttcaccgcatcgctttcatcggcattggtgccatcctcatacctcggatcgtcggcggtcaaccccaccagcagcgacgtgttgccgccggacgacgtgccccagataccgagacggtcggggtccacgtgccattgacgtgcgtttgccctgagatagcggatggctgctttgacgtcctcgagatatgcggggaacatgtcgtgggggtcgctcgaggcatcgcgatgattcaccgtagccaccacaaagccttcgcgggccaaagccgagagctgcgggatctcgtagtcgcgatgcggcgtggtccaggcgctgccttgcacgaataccacggtggggtagcggcggtcatcgtcatcgccggtggattgtggtgagatgatatccatcaccaggttatcggccccggtcttgtacgccacgttgcgggtcagcgtggccaatccggcaagcgtgggattgtgcgggatatggatgacattgtttgcgccggcgttggcatcactgactttggatgaatcggtagtgttcatggaatccccctagctctgttgctatagaggtcatcatacaagaaataggcatgatcacggcacaacgatgtctcgatcacagcgaagacatgaagacgcgaagacgcgcccggcagcgcgcgctgcctgcctgcgagttgccttcaagtgcacttcaagcgataaggtgacataagccgcggcaatggagattgctgcccggcaacgaggcggacagtgcccgttcgccgattcacgataacagaaatgagacactatgaagactcaggaaatcggacaatccggcatgattgcgtcacgagtggcgctgggtgtgatgcgcatggacgcgttggatgccgccgatgcggcacgtaccgtggccgtggcccatgattctggcatcgactatttcgacacggcggacatctatggattccatgatcatgccgcgcacgccagttcgaagcgtttcggccaagcgtggaaggacgcaggactcgaccgcagcaccatcttcatccaaaccaagttcggcatcgactacagtttcggcgaaaacgatggcggcgcaaacgggtatgacttcagcgccaagcatctgattgacgcactcgatcacgagcttgaggctttgcagacggattacgtcgacgccgtgctgctgcaccgtattgacacgctgtttgagttgaacgaggtcgccgaagcattcgatgcgttggaatcaagtggcaaagtgcgtcatttcggagtcagcaatatgggcccgtggcagatcgaactattgcaaagcggccttcgtcagaaattggaaatcaaccaactgcagttcggcctgatgcatacacagatgctcgacgctgaaatccaattcaatatggcgagcgatcccgcagccgatcgcaccggtggcatcctgccttattcacggctgaagcatatgaccattcaggcatggtgcccattccaatccggcacggaatacggtccgttcgtcggcaacgagcatttccccgagctgaacgccgaattgacccgtcttgccggcaaatacggttccacgcccaacggcattgccgtcgcttggattctgcgtcatcccgccggtatccagccgttgctcggctcaatgacaccggagcgcatccgccagatggcggccggtgccgatatcgaactcgaacgccgtgactggtggtcgctgtatcaggcagccggcaatccgttggtgtgagcgagagatgacgagaccactgccgttgaggcgcgtgttcagcgtgcatacatctcaacggcagtcaatgctgtgtcaatccacccacgacgagaacaacgacacgaacattccgcgaatcacatcagaacgacggcatatcgagcgagggaactgaatcatcggccttactggtcccgttcgcgggcgagccgacatcgtgattgtggaaccactcgacaacccgtgtttcactcatcggcatcaaatcccaagcatccaagccaacattcagtgcctccgggcgtgcaccaccgagtccctcaatctcaaccgtatcgtgcggctccaaactttcgaacaggttaagtgcggggcggtcttccaaccaccagtcgtgaaatacctcatgacagtcgccttcccttttcggcgtgcagcaatcgtttcccatcctaggcgcagccggcacctgtcggttcgtgttgccataatgaggcgcattgcaggggaaccagtgaacgcaagctgccagccatcgtgacggcgaacgggttgagaaaggcgctgtgcctgacccttggaacctgttggccaacaccatcgaagggagcaaacgatgtcttttgacgtcgccgcattcggcccgatcaccttgaaccacctgccgccgttcgcccagcgcctacgacatgcagtacacgtggaaacccgaatgggacgtgtgaggcgcacgatggatgagcggtgggcgcgtgctttgcgtgccaagggcattgatattgacgaggctgacggtgctggtgggaaacaggcacacgacggcaaacggcataccgacatcacgggtactggtcgacgccccgagtcccagccggctgccgggctccgcggtcgatccaataccagtacgaatctgccggggccgaaggtgacggcacgcgccacgccattcaaggccaccggtcataagggcggcatcagccggcaggggaattgagctgatcgcagaaccatcgcgcgatgaatgggcgcggccaacgccattccgccattgttgagccgcttctacttggaccggtacctctttgaacggagatatcattccgcaaaaggtcgaatgtacctctttgaacggagatatcattccgcaaaaggtcgaatgtacctctttgaacggagatattccatattgaagctattccggcatcatatggtacgtaggaaatcccggatatcggcgatttcctcatcacagatggcatgggccatgccggaatactcgcgataggtcagatgtccggcccgttcaaggacctgatgggccgtttgctggtcgggcagcggaatcgtgcggtcctgcgcgccatacgccaggaagaatcgggtaggggagtcaagcgccgcctgttcctcgcccatgaacgaaggactgagcaggatcgcggcatcgaacaacgtcggatgcaccttgaccagacgatacgacagataaccgccttgggagaaaccgatcaatatcttcctgcgatgggcgaatgccgaggcatccagcagtgaagccaccgcatccccgaccgccgcgcattcgcgttggcgctcgtccacgccgcagccgtcgggataccagtaattgccgcccatatagggcctcgcgtaggtggcgcggaacgagatatagctgggtacggcggcaattgcggccggggccgcatcggctcgcgtcggcgcatatacggcgtcgagaatccgcatcatctcgctttcgtcgttgccgtaaccgtggaacatcaggaaaatggggtcattgccgccggcatcgatctggcttgtcatctgcattcgcatcgtcatcacctcaccagcgagcttacatgcattagacttgtagcgattgacccaccgagcacgcaaggagcaagttatggagccgaggcgcgggcctctcaccgcaggcgagaaagtgcagttcaccgaccgcaagggcaagaagatcaccgatcagcttgtggccggcggctccacgcagaccgagcatggcctgattctgcatgacgatgtgattggcaagaccgaaggcaccgtaatcctcaccgtgcatgccaagcgcgaggcacaggtcaatcaggtctaccccgagaaagacaagaacaagccgtggaaatcgtcgcgcgccatcggcggctgggagtatgcggtgatgcgcccgcgactggccgattatgtgctttcgatgccgcgcggcgcgcagatcatgtatccgaaggacatcgcccaagttattcagctcggcgacatccgctccggcatgcgcgtgcttgagtccggtgccggctcgggcgcgatgagcgtgaacctgctggacgccgtgggcgagcgcggccacctgaccacgatcgagctgcgccccgaattcgccaaggtcgcccaagccaatgccacgctgtactatggcgaggcccccagctggtgggatctcaaaaccggcgacttcgattccgttgccgccgaactgcccgaacactggttcgaccgcatcatgctcgacatgctcgacccgtggaacaggctcgagcaggcataccgcgtgattgcccccggcggcgtgttggtcagttacgtaactaccaccacgcagatgagccgcatggccgaagccctgcgcgcggccggctgctggaccgagccgcagatccaggaatcgttcgaacgcacatggaaggcccagggcctcgccgtacgccccgaccaccagatgatcggtcataccggtttccttgttatctcgcgcgccatggcctccgggttcgaggcgctcagaaagcgcgatcgcgtgaccaaggacacacagaccgacatcgactcgctcaccgacgaacagcgtgaagcgcagatcgaggaactggaactgcgcgacatctccgaccacaaactacgtaaggtgttgcgcgacctcgaccgtcaggtgggagaacttggcaatacgcacgaataaccgccaaacgatgagtttgtgaacgctcacacacctctatactggaagcaataccacaccgccacaccgccacaccgggcagacggttcgtgaagggagccacggatgggcatcaagctgagtaaagtcgccaaagcggcgaagaaatacgaccatattctcatcatcatgaggcatgccaaggctgagccgttcggcgacaagggtgactcggagcgcgagctcaccgacaaaggtctgaaacaggcgaaggccgtgggcaagggcatcgagtcgttgggactggtgcccgaccaaatctcctgctcgtccgttacccgcacgcgccagacgttggaccgcatgctcaagacctttggcgacaagccaatcgtcgactaccgcatcagcctgtatgacgggggagtgcaggcggtgttcgacgagctcgcccacgtcaaggccaagaatcgcgtgttcatgatcgtgggccacgagccgactgtgtcgatcagcgcccaatggctcgcctccgccgactccgacggcgaacgactcgacctgctgaatttgggactttcgcccgcatccatcgtgatcatgggatcgaacaaaccgttcgacgaatggcaggtgcacagcggcgaactgctcgcggtcatcaatgtgaaagacttcgactaaagcggatataaattccatctataacgacactctgcggccatttataagggccggaatccggatgttttgctaccctaagtcgggttacgaacgcatacattggaggattcatgtccactctgacttccgtctccggcttcccccgcatcgggcagaaccgcgaactgaagaagatcatcgaaggctactggaagggtgccaacgacctcgccgccgtcaaggccaccgccgccgaactgcgcgccaagcactggaagctgcagcaggccgccggcatcgacctcattcccagcaacgacttcagctactacgatcagatgctggacaccgccatccttctcaacgtgattccgcagcgttacgcacgtctctccttcgacaaccaggaggacacgctcttcgccatggcccgcggctaccagggcgacaagggcgacgtgaccgccctgccgatgaagaagtggttcaccaccaactaccactatctggtgcccgaagtcgagtcggccgcggagatcaagctcaactccaccaagccgttcgacgagttcaacgaggccaaggcgctgggcatcgacaccaagcccgtgttcatcggcccgtacacgttcctgaagctcgcccgcaccccggaagccaccgaactcgagctcgacaagggcctggtcaacgccgtggccgccgtttacgccgaagtgctcgccaagttcaacgagctcggcgccgcatgggtccagctcgacgagccgtacctcgtgctcgacaaggagccgggcgacgttgaactcttcaagaccctctacaccaagatcctgtccgccaagggcaacgtcaaggtgctgctcaacacctacttcggccacatcgccgacgtgtacgagaccgtcaacctgctcggcttcgacggcatcggcctggacctcaacgaaggccgcgaggagaacctcgaagccgtcgccaagtacggcgtggcttccaacaccaccatcttcgccggcgtgatcaacggccgcaacatctggcgcaacaactacgccacctccctcggcctggtcgacgccctgaagcaggtcaccgccaacgtggccgtctccaccgcatcctccctgctgcacgtgccgttcagcaccgaaggcgagaccggcatcccggccgaagacctcaagcacttcgcgttcgccgtccagaagctcgacgagctcaaggaagtcgccgccctggccgacgccaccgaggacgagaagaaggcatccgccgccctcgccgccaaccaggctctgttcgacggcacccgcgtggccgccgacccggccgtcgccgagcgcatcggcaagctgtccgacgccgactacgtgcgtcagcctgcccgcgaggagcgtcaggccctgcagcgcgaggccctcggcctgccgctgctgccgaccaccaccatcggctccttcccccagaccaaggagattcgcgccgagcgtgccaagctgcgcaagggcgaggtcaccaaggaagcctacgacgagttcatcaaggcccagatcgacgccgtcatcaagaagcaggaggagatcggcctcgacgtgctggtccacggcgagttcgagcgtaacgacatggtcgaatacttcggccagaacctcaacggcttcctgttcaccaagaacgcttgggtccagtcctacggcacccgttgcgtcaagcccccgatcgtctggggtgacgtgtcccgcgccaacccgatcaccgtggaatggtccgcgtacgcccagtccaagaccgaccacgtgatgaagggcatgctcaccggcccggtgaccatcctcaactggtcctggccgcgcgaggacatcacccacgaggagcagaccaagcagctcgccctcgccatccgcgacgaagtgctcgatctcgaggccgccggtatcaaggtcatccagatcgatgaggccgccctgcgtgagaagctgccgctgcgcaagtccgactggcacgtcaagtacctcgactgggccgttccggccttccgtctggtgcactccgccgtcaagccgaccacccagatccacacccacatgtgctactccgagttcaacgacatcatccgcgacatcgacgcgatggatgccgacgtgatctccttcgaagcctcccgtggcgatctggtggtgctcgacgccattcatgacgcgcacttcgagaccgaggccggcccgggcgtctacgacattcactccccgcgtattccttccgagaaggagatcgaggatcgtatctacgagattcttgacaagatggacgtcaagaaggtgtggatcaaccccgactgcggtctgaagacccgtggtaacgccgagacctggccgagcctggagaacctggtcgccgccgccaaggccgtgcgcgccaagctcgacaagtagcggaaatcaccgagctccctctggatgagggagctcgggtttatgtaaggaaatcagcatgcattccccgatgttcacccttgaggtctttcccccgaagcgcaacgcgcctgttgacaccatctacgacaccctcgacggactcgaagggctgaaccccgacttcatctccgtgacctacggtcacggcacccattccgaccgcaccgccaccgcgcgcatcgcccacacgatcagcaaggaatacggcatccccgcagtcgcccacctgaccgcgctctactccgacaaggccaagatcgatgaggctcttgacatgttcgaggaagccggcgtgagcgccgtgctcgcgctgcgcggcgactacatcgacggcgagcagctggtcggcgagttcaaccacgccagcgacctcgtgtcatacatccgctccgtgaagccggacttcaaggtgtttggtgcttgctacccggaaggccactatcaggctgactcgctggaccaggacatcgaaaacctcaaaatcaaggtcgatgccggcgtcactcacctgatttcccagctcttctacgacaatgaggacttctaccgcttcctcgacaaggcgcgcgccgccggcatcaccgtgccgatcgaggcgggcatcatgccggtgcgtggcgccaagtccgtgcgtcgcatggccgagcgcaacgcctcgcgcatcccggacaggctcaacaccctgctgaacaagtggggggacgacatccagtccctgcgtgccgccggcatcctctacgcttccgagcagatcgccgacctcgtggcccacgacgtggacggcgtccacctgtattcgatgaaccaccccgccaccacgcgccgtatctggcgcaatgcggaaccgttgttccgcggtacgcaaggttgacgcatatcgcggcgcggcgcatctcaatgcgtcgcgccgcacgttaatctgctggcgaaacccagagttctcccagcggccgatgggtatcatgaacgtgcaagccaaccaaagcgatggaagggagtccgttatgtgcactggtgtccgtttctccgatgatgagggcaacacctatttcggccgtaatctcgactggagtttctcatatggggagaccatcctggttactccgcgcggctaccactatgacacggtgtttggtgcgggcggcaaggcgaagccgaacgcggtgatcggcgtgggtgtggtcatggccgataggccgatgtatttcgactgcgccaatgaacatggtctggccatcgccggcttgaatttccccggctacgcctcgttcgtccacgaaccggtcgaaggcacggaaaacgtcgccacgttcgaatttccgctgtgggtggcgcgtaatttcgactccgtcgacgaggtcgaggaggcgctcaggaacgtgacgctcgtctcccagatcgtgccgggacagcaggagtctctgctgcactggttcatcggcgacggcaagcgcagcatcgtcgtcgagcagatggccgatggcatgcacgtgcatcatgatgacgtcgatgtgctgaccaatcagccgacgttcgacttccatatggaaaacctgcgcaactacatgtgcgtcagcaacgagatggccgaaccgacttcatggggcaaggcctccttgaccgcctggggtgcgggtgtgggcatgcatggcatcccgggcgacgtgagttccccgtcgcgcttcgttcgtgtggcctacaccaacgcgcattacccgcagcagaacgatgaagccgccaatgtgtcgcgcctgttccacaccctcggctccgtgcagatggtggacggcatggcgaagatgggcgacggccagttcgaacgcacgctgttcaccagcggatattcgtccaagaccaacacctattacatgaacacctatgatgaccccgccatccgttcctacgccatggccgattacgatatggattcctcggagctcatcagcgtcgcccgatgactccttcccggctcatgccccattcggagggcatgagcgtatatagtggaatcttatggaatcgtcgatcttcaaacccagctccatggacctcatcagggcaggtctgcaagacctcgacaaggcccgcgccttgttcgaccagctcaaggcggacgacattcccgatgagcgatgcgccgaactgctgagcgcgctggcccacgcctgcgaccccgatatggcattgagcaatttcgtggatatcgtcaacgcgatgcaatccagccagcgcgatctggaacacgtcatctccgacaacgacgccctgaagcgtctggtcacggtgctcggcgtctccgacgcgatgggcaagttcatgcgcttcaagccgcagcttgtggaggcggcagcagtcgacaactgcaacagccatctgttcaatcacgcgcaacgccgtgcacgtctgctcaaggcggtcggcgcggacccggacgaaccggccatgcccgtcgcctccaaggatctggccgaagcggccacggccttgcgttccagctaccggaaccaactggccgccatcatcgcccaggatgccgtggcggacgacccgacctccatccaaccgaccatcagccgcgaactgtccgacctcgcggacgcggcgctcgaaggcgcgctggccatcgcccgtcacgaaaccgagggcagcgagcacgtgcgcttcaccatcatcggcatgggcaaactcggcgcacaggaactgaactacgtctccgacgtggacctcatctacgtggtcgaaccggccgacaaggacgtggaccatcagacgctgatccgcgtgggcaccaagatgggcaccgtgctgcagcgcgtctgccagtccgccatcatgggcgtggctgagcagccgctgtggcagatcgacggcggcctgcgcccggaaggcaaggacggcgcgctggtgcgcgtgctctcctcgcacaagaactattacgagcagtgggccgagaactgggagttccaagcgctgctcaaggcccgcccggtggccggcgaccccgacctcggccaggcctacatggacatgacccggccgttcgtgtggagcgcgtccaagcgcaagaacttcgtctacgactgccagaaaatgcgcaagcgcgtggaggatttgattcccgcgcccctgaaggaccgcgagattaagctcggccgcggcggcctgcgcgatgtggaattcaccgtgcagatgctccagctcgtacacggccgcaccgacgaatcgttgcgcaccagcaacacgctcgactcgctgcagcgcctgtccgaaggcggctatgtctcgcgcaagcaggccgtgcgcatgtcccaggactaccgcttcgagcgcgtgatggaacatcgccagcagatctggtccctgaagcgcacgcacctgttcccggacctcggccgggcctcggtcggaggcctcgaaaagaagcgcgacatcgacgtggacgagctcaaccagaaccaggaactgcgccgactcgcccgcgcattcggcctgcacccggaagaactcgtcgacaagtacgacgacacccgccgcgaagtacgccacctgcacctcgacatctactatcgcccgatgctgccggtcaacgcccagatggagaacgaccagatcgtcctgagcgtcgaggcagcacaggaacgattcgaatccatcggtttcggcgacccggacgccgccatccgccacgtgcaggcgctcactgccggcgtgggacgcgcggccaaaatcaaccgcatcatcctgcccgccgtcttgcagtggctgggcgagggccagaacccggacatgggcctgctcaactggcgcaaactggaggagaacttcggcaccgaatccggctacctcggcttcctgcgcgactccacctccgccgcccagcgcctgtgccacatcctgtccaactcgcgattcctgggcgacgcgctcaacaagtcggtcgaatcgatcagctggctcggtgatgacgacaatctgcaggcccgcacgcgcgaggccttggacgtgcagaccggctcggcgctggaacgcttcggatcgaacatcaacgagttcgccacctccatgcgcgccatgcgccgccacgaaatcgaacgcatcggcctgtcttggatgagcggtgtgatcagcgactccgacagtctcaaggccatgaccgacgtgtatgacgcgatcatcgatgcctccctgacctgggccgtgcgccaccagatcgccgagttcggcgtcgaaaccgcgccggccggcatcaccgtcatcgccatgggccgttacggcgggcgcgaagtgaacttcagctccgatgcggatgccattctcatctaccgtccggccgacgatgccgacgacggccaagccaacgccttcgccaggaaggtcgtggaagacctgcgcaacatcctgcaaggaccgacgacgctggaacccaagatcgaactcgacctggacctgcgcccggaaggcaagaacggcccgctcgtgcgctcctatgcctcctgcgaggaatactacgaatcctgggcttcgacctgggagcgccaggcgctgctgcgcgcccggtacgcggccggcgacgctgaactggcgcgggacttcctgatcaacatcgccgatccgctgcgctacccgaccacggaactgactgaagcagaattgcagaacatccgcaagctcaaggcccgcatggaagccgagcgtctgccgcgcggcgtgcgccgtgaacggcatctgaagctcggcaagggcggcttgtctgacgtggaatggaccgtgcaactcatgcagctccagcacgccggcgatatcaaagatctgcgcgtcaacggcacgttggaggcattggacgtgctggaagccaagaagctcatcagcgctatcgacgcgattcagctgcgcaaggcatggacgttgtgcaccgcggcccgcaacggcagctatctgtggagcgggcgcgccaaccaggccgatattctgcctgatgacatctattcgctgggcggcatcgccgtctacctcggctacggcgcccaccgcggccagcatttcgagaacgacctgctggccgtgatgcgcaaatgccgtgacgtatgccagcgcttgttctatgggcagaccgaaggcgaggcggctgcggcaaccaccgccacggcctccgccgcaacgcagcagccgcaaaccgcccctcgcccgcgtatgcacgtgatcgcaccgcgactggaacgaaatcgacgccgcgcgcagcgataaggcagcatattcgttggattttcaggtggacactcggtgaatgcggctgtccgaaaaatggcgtaagttagattaggtcacgcaagggtggccacctgaaaaccacgagcgaaaaggtgagccttgtctgaagaaacgccaatggtcggcaaaagcgtcgtaacgctggacggcctgtctacaaaccagattctcgacctgctgcataaggccgaatacatcgattcccaccgcaaagaggttgcccatacctgcgatgggcgagtgctggccacgctgttctacgagccctccacccgtacgcgcctgagctttgagaccgccatgctgcgtctcggcggcaaggtcatcggattcgccggcgcgcagctggcctccgtgaccaagggcgaatccatcgccgacacgttgaagaccgtgtccaactacgtggacgtggtcgccatccgtcacccgaaggagggtgccgcgctggtggcctcccgcgccgcatccgtgccggtgatcaacgccggcgacggcggccacatgcaccccacgcagacgctggccgacctggccacgctgcagtcgcgcttcggccgcatcaccgacctgaccgtgggactgtgcggcgatttgaccttcggccgcaccgtgcactccctgatcgagaccctgtgccgcttcggcaacgtgcgcttcgtgctcatcagcccggacgagctcaagaccccgcagtacgtgatcgaccgcatcaacgccaccgacagctgctcctacgtggaagtgcgcgacctggcctccgtgatcggcgacctcgacgtgctgtacatgacccgcgtacagaaggaacgcttcttcaacgaagacgactacctgcgcctgcgcgacacctacattctcgacgaagagaagctgcagctcgccaagccgtccatggccgtgcttcacccgctgccgcgcgtcaacgaaatcgccgtggacgtggacgacgacccgcgtgccgcctacttcgaacaggtcaagaacggcatgctcgtgcgcatggccctcgaaagcaccgtggtgggcgacgaactgcccggatacgaaccgctcaaccccaaggaggttcaggcctgatggaagtcaccagcattcagaacggcatcattatcgaccatgtgccggccggaacctcgctgaaggttctcgaatacctgaaaatcgacccggccaaaaccaagcttgcgctcatcatgaacgccaactccaagcgttacggctccaaggacatcatcaaaatcgaagatgacaaggacatcgacctcgacgtgctcggcttcgtggcccgccaagccaccgtggacgtggtgcgcggcggcaagatcgtcgaaaagaagcagccgaacctgcccgagcacatcgtcggcgtgatctcctgcgtgaacccgcgctgcgtgaccaccaccgagcccggcatcaagcagatgttccacctcgtgcactccgaacggctcgaataccgctgcgactactgcgacgaggaagccaaactgtgagcatcaccctacgcaacatcaaggtctggaacaccggcgaggtcatcgacctcgtggtgcccgggaccgctgccgcctacttcgccgacacctccgccgtggctgacggcgccgacatcgacgccaccggcctgaccgtggcccccggtttcgaagacccacacgtccacttccgcgatcccggccagacctacaaggaatctatggtctccggctgccgtgcgtccgcatccggcggatacacgaacgtgctcatcatgccgaacacgttgccggcactggatgggcagaccgtgtctgacccggaagcggccggtgcaaaagaggttctggatgccggcttcgacaacgtcatcgacttcctgcagcagtacgatactgcgcacgatgttcaattgccggttcgttacgatctgtgcgtgtgcgcatccaaggatcgcgccggtcatgaggcaagcgacgttgccgattggctcaagtacgtgcccggattcgaggacgacgccaagacgccggccatgctcacgcaccccatcaccgcaatcagcgacgacggttccgctgtgacgccggagatcctggaccaggtgctggagaacgtcaaggcctccgacctgtacctgatcgagcattgcgagcatcacgatacaggtgccgtgaacgaaggccctgtttcccgcgagcttggcgtgcccggcattccggaagacaccgagctcaagatcgtggcccgcgatatcgaagcggcccgccgcaccggtgtccacgtgcacttccagcatgtgagcactgccatctcgttcgaggcgattcgcaaggccaaggccgaaggactgccgatcacctgcgagaccgcgccgcactatctggcgttgagcgacgaggcgctgctcaagtacggcacgctcgccaagatgaatccgccactgcgctccgaagcggaccgcaaagccaccatcgcggccatcgccgacggcaccgtggatctgctggccaccgaccatgcgccgcacacgttggcagagaaggaactcggcttccttgaggcgcccaacggcatcatcggactggaatgcgcgtacggcgtgtgccacaaggtgctcgtcgacggcggcttcatttccgatgagcgtctgatcgagctcatgtccgttggacctgccgaactcatggggcatgtgccaaccgacgtggccgcgctggtcgaggactacgccgaacccgcgcccaccggggatgatccggatggcgtgattgcgggggagggcgacgctcagccgcagcgtgaaggcgtcaaccgactgctcgacttgagccgcgtggatgacgccgacaatgtcgacctcgtggtgctcaacaccgccgaggaatggaccgtggaccccgaacagttccactccaaggctcgtaacaccccgttcggcggctggcaggtcaccggacgccccctcgccacaatcatcggctcccagctgatgttcagccgtctgtagataacacaaggagcagcatggatcgcctgatcgaagcgattgacaacactcagaaccccagcgtcgtgggccttgaccccactgaggcgctggtgccgccgcaggtcgtggcgagctttgccgacgaggtgcgtgactcggtcgaatccccggaggaagtcgaatccgcgcagctggccgtcgcctacttcgaatacaaccgcacgatcattgacgccatcgccgacatcgtgcccgccgtcaaaccgcagatcgccatgtacgaggcgctcggccccgccggcgtggacatctacacgatgacctgcgaatacgcggcccagcagggcctctacgtgctcggcgacatcaagcgtggcgacatcggctccaccgcagccgcctacgcccaccatttgaacggcgtgggcgacttcgacccgtggcacgaggatgcggtgaccgtcaacccgtatctcggcaccgacggcatcaccccgttcgtcgaggccgccgccgaagccgacaaggacatcttcgtgctcgtgcgcacctccaacccgtcctccagcgaactgcagatgctcgacctggccgacggcacgaaggtctacgagcacgtggccgatcttgtggaaggatggggcgccgagaccatcggcagccacggctactcccgcgtgggcgcggtggtcggcgccacccaccccgaggaaggcaaggcgctgcgcgcgcgcatgccgcacacgttcttcctcgtgccgggctacggtgcgcagggcggcacggccgcggacgtggcaggcatgttcgacaagcagggcagcggcgccatcgtcaactcgtcgcgcggcatcatcggcgcatggaagaagagcggcaagtactccgaatccatgaccgccgacgaggcgctggaccttgtggcgagcagcgcgcgccaggcggcgctcgacatgcgcgataatctgcgggttgccgtatataggtaggtagattgtccggctgtgggctatacgtgagtgtgggctggaaaccggagccgagtgtgtttaactacccctcagtcaacctgcggttgacagctcccctgataaggggagcttgatgtgctgaataggaatgaaatgacaactttcacccccacccatgatgtggttacggaagcgactgcggccggattcttcccgccgcgccataacgtcgaaatcacgcaggttacggaactgaccgaccgcgtgatgcgactgacgttccgcgacccgttcatcgcctcccatgccaagcccgcccagttcgtcaacctgttcacgcacgacgacttcatgctcatgccgcgcccgttcggcgtcagcgaagtcgacggcgacgaagtcagcgtgatcttcgccgtcgtgggccacggcaccgaacagttggcaggcctgcaggccggcgacaccgtcgacgtgctcggcccgctcggccgcggcttcaacctcaaggaagacgccaactacattctcgtcggcggcggactcggcgtgcccccgctaatctacgccgcgcaaaagctcgccgaacacgacgcctcctttgccaccgccgtattcggctaccgcaacgaccacttcgccgaggaatacgtctcccggtacgcggactggtcgtggagcatcgacgacgccgaaggcaacgtggtcgacctgctcaacaaactggaacaaggcgacgacctgaaggcttacgatcgcaagccgatcattctgtcctgcggaccgctgcctatgatgaaggccgtggccgactgggccgccgaacgcggcatccccgcgcagctgagcatggaacagcgcatgggctgtggctatggcgcctgcgtgctgtgcaccatcgacaccttggacggccgcctcaaggtctgctccgacggacccgtgttcacccgcgaacagctcggatgggggaagtgacgatgagcgcaaacaaccagtccgcgcagggcggcgacaaccacatcaacctgtacgagccccacgtgtggaagcaccacaccaaggtggccggtctggaatggaagaatccggtcggcaccgcctccggcaccttccagtacgccgccgtccgctggttctacgacgtcagccagctcggcgccgtatgcaccaagggcgcctcgcccgtaccgtgggaaggcaatccctcgccgcgcaccgccgaatcgccggccgcgaacatcaacgccgtgggcctgcagaatcccggcatcgaccattacttggccgaggacctgcccaagctcaaggccgcgggcgcgttcgtcatctccaatgtcgccggacattgcgatgacgattacgcggcggtcgtggaaaagctcgccgactccgacgcggacatgctggaaatcaacgtcagctgcccgaacgtttccgccggtggcatgagcgtgggcaccgacccggtggccctcgccaatcttatggaccggctgcgcccgatgaccgacaagccgatgatcgtcaaactcacgccgaacgtcaccgacatcaccgtgccggcgcgcgcggccgtggaacatggcgccgacgcgttgagcatgatcaacacgctcaaaggcatgcgcattaacattcgcaccggcaagccgatcatcgccaacgtcaccggcggcgtatccggcccggccgtgctgccggtcggcctggcagccgtctatcgggtgcgcaccgcactgccggagattccgatcatcggcctcggcggcatcgacagcggcgagaaggcgctcgaatacctgtacgccggcgcgaacgccgtcgaagtgggtgcggccgcgctcttcgacccggtggccccgctgcgcgtcgcccgcgaactcgacgacctgttggacagccgtcccgaactcgctgctaaactggccgcaggacagacttggaggtaaggaacatcatggcagaaacactcgcacatcgcttcactgaattcctgttggaatccaacgcgctgaagttcggcgacttcacgctgaagtccggccgcaagagcccgtacttcatcaacgccggcgccttcgacgacggcaagaagatcgccgcgctcggcgcgttctacgccgaaaagattagccaggccatcgtgcacaacacgattccccgcaacatcgacaccgtgttcggccccgcctacaagggcattccgctggccgtgtccaccgcgatcgcgctgaccgccggccacaacatgaccgtcggatacaccttcgaccgcaaggagaagaaggaccacggcgacggcggctggatggttggcaccccgctgaccgacggcatgaaggtgctgctcgtggacgacgtgatgaccgccggcaccgccgtgcgcgaagtcatccccaaactcaaggccgaggcgaacgtcgaggtcgtgggtctcgtgctctccgtggaccgcatggagaagaccaaggactccgacatgtccgccgtgaaggccgtggaagccgaattcggcttcccggtgctctccatcgccaacgtgcgcgagatcttcgacgccgccgccaagatgaagaaccccgacggcaccccgctgctcagccacgacatccagcagcgcgccgccgcctaccttgaggaatacggcgcctgatcgtcttcaatctaaaaaccaaaagcgggcttgcgagcccgctttttttattacgttccatgaacagcagcaccatattaaggcaaaagctttggcaaggagcgtgctatgaactggttagttgatatagggctgtttgcgctcgtggggatatgcagttacttcggcatcgagcatcatctggacagcaaagcgaacaagttgtcgcaaggtaatgaagaagaccgccgagatgctgatgcccaagtagaagcagcatgaaaatggcggaatgacgttggggtgatgccgctcatactcgggatatgacggatgaacagcctcttgaaacggagataaatgtctccagaaggccaaatcagcccccttgaaagcgagatagtgttctaaactctgggaccgactcgcctgtgatgaaaacccgctcggcgtagaattaccgtaggttcgttgcattcgaacaaggaaggccgctatggggaacatcaccgacgatattcggcaacatttcgacactttcgccgaactgccgttcaccgaggcggatagcctcgctttgtcccagttggcctatgctcgcatgccggataacgtgccgcgctatcacgagaatgcagagaccgccgacggcatgatcgccacggttccgattcacgatttgctgcgtgccgaatgctatgacgacatgttcggcaaggtgtggtcgccttcgatgaatgtcgatctgttacgtgcgatgagcgagagcccacgttggaggaacctacgcgtgggcgcatacgtggacgaattcgatgccgaaaccaccaagcagttctcggcctgcgtgttcgaactgggtaacggcacgctctatgtggcttttcgcggtaccgacagctcaatcgtcgggtggaaagaggacttcatgatggcgttccgccgcccggtcgcctcgcaggaggccgccgcgcgttatctgaccgagctggctggccattgggccgggccgattatggtcggcggccattccaaaggcggcaatctggcggtgtatgcggcggccaatgtgcctagcgagattcaggaacgtatcacggtcgtatattcgcacgatgggcctggattcgatgaggtgttcttcgatgaggacgggtacgtacgcattgcgtcgaagatccataaatcggtaccgggctcgtcgatcatcggcatgctgtttgagactcgtgagcatgtggaagacggctatacggtggtcagcagcgacggtgccagcatcatgcagcatttcgcattgcactggcaagtcgatcatggccaattcgtacaggctgatggactgacaggtagcgcgcaatacctggcacgcacgatcaacggatggatggcaaaatacgacgacgagcatcgccgcaagttcatcgaaaacctgtttgccatcttcgaggctggcggatacgacacattcggcgacctcacttcgcatttgacacagtcactgccgattatgctcgccgcggcccgcaacattgatgtcgaagatcgcgacgtgatgattgaagtgctcaaaggcttcgccgcgacagccgccgcgtcggtaatctcggccaagtagtcggaggccatcaaactggttttgccagtcagtctcaatagcgcaagagccggcccctgagatactcaggggccggctcttacttccatttccccagcggggttggcttaatcgcagtatatctcactgctgaccatgcctgttttacttactcctaatcaatgagcttgtagccgtggtcggagactacggacttgagcttgtcgagataggtttcggcggccttggagagcttggaacgctcgttcgtgatccagccgaccaacatcgtttcgtcggtgtcgagcggcacggtgacgatcttctcgttgttgaggtcgccgttgtcgatgccggtgcacaccgtgtagccgttgaggccgatgatgaagttcaggatcgtggcgcggtcggtcacgttgatctgcttgggggagtactccggccagaccgcttcctcatagaagtagaacgagccttcctcgccctgctcgtactggatgaacggataaggtttcaggtcctccatggtgatgaccttcttggcggccagcgggttgttgcgcgagatgaacacgtgcagcggcgcgcggaagagcgggtggaattcgaggtgcttctcgcgcaggagcttgccgatcacgtccttgttaaaatcggacaggtagatgatgccgatttcggactgcatgttggcgacctggttgatgatgtcgcgcgtgcgggtctcgcggatggtgaactcgtattcgtcggacttgatggagttgatcatctccacgaacgcctcgacggcgaacatgtagtgctgggtggagacctggcacagctgcttgcgcggtttggcatgcttatagcgctcttcgagcaggtcggcctggtcgagcacttggcgggcgtaggtcaggaattccgcgccgtccacggtcagggcgatgccctgcgaggagcgggtgaagatctcgatgcccagctcgttctccaattccttgaccgacgagctcagggccggctgggagacgtacagggcatgggaggcctcgttcatcgagccgcactcgacgattttgacgatgtatttcagctgcagcagtgtcataaagtctatttatatcgctagggatagtcgccacacggccggtcaccgtcgtcaaggacgggtccatagacttcaactgccgcgatgcaacgtttggcgacttacagacgtacgccgagttctgcgagcgattcgcgtgcctgcaacgcgttctcgaagaggatgccgtggatgccgacctcgttggcgccgacgatgttcttggcggtgtcgtcgaagaacacgcagcgctcggccgtgaggccgaaacgggtcagggccagctcgtagatgtcggcgttcggcttatgcatcttctccacgccggagaccacggtgccctgcaacagctgttcaaggcgcgggtacttctcgaaggccaggtggaaggtctcatgcgaccagttggtcagaccccatacgccgtagccgtgggccttcaaatccgccagcagctcgaccatgcccggaagcgtgcggggcagcgcgtccgcgtagtggccgatgtagaacttgaagatgtcggcgagttcctggccttgttcgcgtaccacatccgggtagatgtccgcgaaatcctcgccggtgtccatgcggtcctcgtagcggaagaagccgcaggggtcgtcgtcggcgcagatgcgttccacgatctcatcggggaatcggccttccaggcatgcgcgggtgttccagtccagcagcacgccgcagaagtcgaaaatcacgtcggtgatgggggagttggccatgatgctccttgtgttgttggggccgttgagtggggtctgcgatttagtatagggggtttcatacgttggctcccctctctgaggggagccaacgtacggaatcatgcgatgacgtcggcgatggcttcggggatggcgtgggccacgtcgccggccacaatcgggtggccgagcgtcatgaagcgctggcgatgctcgcggccgatcagttccggctcctgccagccttgttgctcggattcggaggcgatcgccgccgccaggccatgcaggtaggcggccgaggccacggtctcgcccgtggtggccacgtcatcctgctgggcgagcagggcgccggtcagaccggccagcacgtcgcccgcgccggcggtgcccagccaggccggtgcgctacccgacgcatagacgtggtcctcatccaccacgatggtcaccgcgcccttcaacaatacggtggcgccggtgagctcgtgggcacgcttcgcgctggccaacgggttcaaccgcacgtcgtcggcggtgtacggctcgtgcgaatcggcatgctccgcggtgctggcggcggtttcgaaccggttgagcagtttcgccatctcgccggcatgtggcgtgatcaccacctggccgggcacacgctccggcagcaggtcgagtgcgccggcatccaccacgattggcggcatgtcgtaggcgtccttgttctcatcctcgctgccgagcgcgtaatgcttgagcaatgcggcgatggtgtcccgctgcatatcgccgtcggtgccctcgacgctagcctcgggcacgccggaccccacgacccaggactgcacatgtcccttgccgatcacggcttctggcagtgcggcgagcaccatgttctgcgcgcgctccgggcccagataccggaccatgccggtgttcgcgcgggcggcggcgctggcggtgagcacggcggcaccggggtagcgctgcgagccggtcaccagaccaaccacgccccgggagtatttggaatcctcgaacctggggagacggaccgcgtcggacgcgaacgaattatccaccacctcgacgtccggatccttgtcgtcgatatcgaatccgaaatcgagcaactcgatacggccgcaggcgaacgtggcgggcggcagcaccgcgcacggcttcatcgcgccgaacgtgaccgtgaccgtggccggaatgtacgggccgggcagagaaccatcgttcacaccgacgccggatggcgtatccacggcaagtaccagcggaaaatcgcctgacgactcacggtttggcagggcgggctcatcgggagcctcgccgtcgagaccaagggcggaggcgagtgcggcggggatgccgcgtagcgagccttggatgccgatgccggtcatcgcgtcgatgatcagatgcgatttcctggccacggcgatggcggtctgcaatcgctcgccggcctcaccggcggaaaacccggacgcgcaaccgggaatatcagccgcgggatcaagcaccagcaccttgcctccggcgcgcacgaatgaggcgaatccggcctcatgcaacgaccggcccacggcgatggcggtgacgttcgcgccctcctgggccagcgcggcggccgcgaacagaccatcgccaccattgtctccggccccggccagcagcacgatcgacgtgtcctccagcgccagatcctcgtcgtccagcataccggccgccatgtgggccgcggcctgggcggccatgcgcatcagcggcacgcctttgtccagcaggggtcgctccatggcccggaccgtatcggagtcataggcgctgtgcagcagcagttcgcgacgatcggcgtcttcggtgtattccatggcaacccctttcttgtgtttgttacttgcggtccgtgtttacaggccgtacacctcgtgggcgaacttttcgaacacggggatcgagcgcttgaccttctccgtgtcgatgcagtaggccatgcggaagtatccgggcacgccgaagctgtcggacggcacaagaatcaggtcgtattccttggccttcatgcagaacgccacggcgtcgtcctccagcgccttggggaagatgtagaacgtgccgccggggcgtaccacgtcgaagccgatgccggtcagcgcatcgtagagcaggttcatgttcgtctcgtagacgttgagatcggcggtctggtcgatgaccttggccacgcccagctgaatcgagctcggcgggcagttgtggccggtgccgcgcgagatctggcccatcatgggcacgagcaggtcggcgtcggtggctgtgggattcaccgcgacatagccgatgcgttcgccaggcaggctcagcgacttcgaccacgagtagcaggtcagcgagttcgcgtagaagctggccgggtagggctgggtggcgccgtcgaacacgatttcgcggtacggttcgtcgctgatcaggaagatatcgtggccgtattcgacctgcttggcggtcaggatcgcggccagacgcttgagcgtgtccgctgaatacaccgcgccggacgggttgttcggggtgttgataagcacgacctgcacgttcgggttaagtgcagcctcgaatgcgtcgaagttgatttggaagttctcggtgtcggccggcacgatggtcagcttggcgccggcgcccttgacgtacggctggtattcggggaagtagggggcgaaggtgatgatctcatcgcccggcttggtcaccgcacgcatcgcgtgggacagcgcgcccgccgcgcccgtggtcgggaagatgtggttgccggtgtatgccatgccgaaacgttcgttgaggttttcggcgatcgcgtccttgacggatgggataccgagcgagggggagtagccgtggatggccaccggatcgccgttttcgtagaggtcgaccatggcgtcggtgaaggatttcggagccggcaccgagggattgccaaggctgtaatcgaacacgttctggtagccgatttcggcaccgcggctcgtggcgtactcgctcagctcgcgaatcacggacttgccgccaagcatggccttgtattcctcattgatcatggctgttctcctcgcatggttgtactggtatgcaccacgctactactatcgcggccggtttgcgccatttgccgcgccgtgcctaagtcggctgttctatttgttctattagttctatcagtggagtttgaaccggcatatacccttgcaataaagccatttgtagggtctggggctttccggggttgcttgtctcatagattttcagcctcttgatatttgcggttgatggctgtgatgtgcgtgggtgatggctgttgaggcatcatggggatctcttcgactgtccgccgtcgccatgccgccatgatgcctacagaaagtcgagttgcgtatttccgccaagcagggtggtgaccggtgggggcgatcggtgggggtgaccgacacccgctataggcagcaggcagccgcacacatcccaatatctgtgggacggcagacgagtcaatcgtttgtcgtccgcgccgtccctcaagagcgcgggatggcagacaagtcaaccgtttaacgtccgtagcgtcccacaccgacgactgtagaaaccgtggaataacgccgattctcgctgcagctccatgattatgcacaaccgttcatagcgagcgctgtgggacggcgggcggaaaacggccgaatccgcgtgccgtcccacacctcgtacagtccgcgttttgggaaagcatcaccgtaaggctgacgcgcatccgcatccacagcaggagccttaccggccgtaatcccgcactcgattattttttctgacaggaaatcgaacccgaaacactaacccatgcccgccccaccgcaaacagcgaataaccaaaaaaagcatgatctatccttggtgccgaataatgagagcctgactgtagtggctacgggtagctatatcggagaaggattcgatcagaagcgtttcgacacgcttctgcttgccgctccggtctcgtttgagggtactctctcgcaatatgtagggcgacttcatcgcgagaatgatggcaagaccgaggttcgtgtctatgattacatcgacgtgaccgtgcctttatccgctgtcatgtatcgaaaacggctgaaggcatacgcaaatcaaggatattcggtaaatcctgaccatactgagaaaatggacatgctcagtgcaaaggcggaagcgttgcgcgcttgcatgacgaccgcgacgcagggcgaagatgctgcggatgcgttgctcgacacccggtctgacggattattcgaaggcagcatcgttacagccacgaattatgcagagatactccgcaaggatattgccggttgcgcacgttccctgattatctcggctgaatatgtatcacaacagggactcagcgcaattgacgatgaattgctccgactggccgacaggaaagcgctcatcgaagtttatgtccgtttgccggcgactgctgcggtggcaaccagaacacgaatagaacggaatattaatcggctgcgtgctattgggcgcattgtccggaccgtcgaatcgtgttccgattttgccataatcgacgacggattgatttggtttggaggcatccctttacttggcaatccaaggagtgacgactgtgcacttcgattcaaagatacgaaaatcggcgagaatctagcagatggactgaaacgacggtcgtcctgagtcaatattcagttaagataatcgcgcagtacgagggcgtgattgatgtgcgggtccttggcggcatagagcagggtcacgtcgggatgctccgcgcagatgtggcgcagattgtccacggcggcattggcgtcgagctcggcgatgtaacgcatgcggaattccgcgaatttggcggggtcatggccgaaccatttgcgcaggaggggagagggagcgacgtccttcagccacaggtccaacgccgcacgctctttcgtcatgccgcgaggccacaggcgatccaccagcacccgatacccgtccgacgcagtcggctcttcatatatacgtttgattgcaatacccatacgccccatgattggcgtgcgcttgccggaagtcaaggggagacgcgatccatctacccgttcgatttctgggtgttctgtctaaggccttgtgctatgacagctagcgattcagcagcttttggtgatatcgtccaaccggaccgccttgcccctgtcgaaggtgttcatagtgagatcgacgggtttggtcttgatgaacgctgacagcgcggtgtgcggcgggttgtcgatcaagtgggtgatgggggcaatcgcctcctcgacgctgacgcccacaatggcgtaaatggcacgcgccagcagcttcatcagtggcgaatcgaaactgttcaatgcctcattgctgcgcacggcccaagggttgaacaacacatagtggatgcggcctccggtctgctgttggttttccgcgaagagcactcccagcagatcgttcagacgactcgtacagatagtcgcgcaatgctagaacgtgattgatgtgcacccttcattgacggtctctcaattgatctcctgcgattcatgccgtataaggaagttctcgaccaaggcgatcatcgtgtccttccccgcaggtgcggacagcgcaatcatcagcgtcatcgccgccaaggcgttaccctccacaagcaggggagtcatcgtcgcccagtatactgttgccgttcaggaaatacacgaacagtgcggcggcacaacgtttattgccgtcggagaacgggtgatccttgacaacttgatacagcaggttcgcggctttctcctgggtggaacggtacagttcttcgcctccgaacgtctggtagagtcctgcgacgattccttggaacgaaccgttgcgttccctcccgaacagatcggattgcgtgtagaacggcatcgaccggatgaacagcatcgcgtcctcataggtcaagacccactgggactcgtcgcccttgggtatagggacattgcctgtgtcatagtcgttaagcagcacaagactcggcaaatatcgttccaagatctctgcggtgccagcaatttccggttcggtggacctcgatagcaccttgacgacggcgtgaagtgcgtcaagccgcttgtgattgatggtataaccatcaacgagatgctgcttcagaactgagttggcccatcgccggaaatagatgccttccttggatttgacgcggtatccgaccgacaggatcatatccaagttgtaatgctcgacttggtatgtcttaccgtcagatgcagttgtcgcaaattctgtgacaactgaaaatccattgagctcttccctcaatgcattgccgacatgcttgccgattgttttgatatcgcggccaaacagcaaggccaattgctttctgttaagccacaccgtatcctcgtccaccttcacatcgaggtgcacggtgtggtccgcgctttcgtacaaagcaatctgctgcttcagttcctcgccagtcatgagattacctctctttttcggctgtctgtaaatcatgtcgttggcgtcgccaaattatgcatccagtttatcaggacagtcgaacatttgttcgattactgtatctcgcatctttgtatgactttcccgacgacgtattggctatgacggaggtaatgggcacggggataatgctgatgatgggcatttccatcatgcaaaaacctatgccccgtattgaaaaaagctattggaccaagccgttgggcttaggccatgataattgggccattgcgcggcttatccgttcgacggatgttccggatttgcgatggcgttgaattgcaattatcaaatgaaagagcaaattgtatgagcgaaaacaatgatgccaaacacgtgctgttggtgttgatcagtcactccgatttgggaggtgtgagacctactggcttttatgttgatgaggccgcacatccttggcaggtgttcagacgaatgggcttcactgtgggccttgcatccatcgctggtggcgtaccgccgcaggctggccgtcatcccggtgaccctgtgcaagagcaatttctgcatgatgcggatatatcacgccagctagtgaatacgcgcgccttggctcaagtaaacgcgaaccgatatgatgcggtgctattcgttggcggtcacggtgtgatgtgggatttccccaacaattctgtggtgaacgccgtcggccggaacatctgggagcgcggcggcattgtgccatgggcctgcggcattggtggatatgacgttgtcggatggcagttatctgattgccggcaagcaggtcaccggattcaccaacggcgaagagcaaaatctcgggtgttatccgtggctgcggcgggcgaatagaagggagattgagatagaggcaggggagatgccgggtgcatcgccggcatcacgcctccgtgaaatactcgttttcgtccgcaagccggccgcctttgatgaacaggaatcgctcgcacaactcctgcagctggagatgagcatggcgatgctgcggtcggaagcccactgtctgagcacggcgatgagctggagcacgccgtccgggtcgaggtccacgaacggttcgtcgagaatcaggaactccggatcattgaccagcgcgatggaccaacgcaagacgctgtttcatgctgaacgagaaaccggcgggcctgcggtcacggtacggccaaagtcccacaagttcaagcaccgggcggattgggaggcgcgagcggtgggtcggacgattacagtgtgagccgaatacgttcatgaatcatcgaatcacaaggcgaggcggaccgcaagtattcgagagtcgccagttcggtcgatttcaatgacaatggtgtggacgattacgcggatatcgtggcgggtgcgcgcaaggacgccgaaaaccatccggcttacgattccggctactatcagggcggctatccgccggccgatcgcggggcgtgcgccgtacgtgattcacaacatggcgcagcggcagcgcgaaaacgactacttcgccttcaagaagcacatgacggtcaccgggcactaccgtttcgacgcttcgaaagtgctgtagagcgtactcagggcttggcggtgacggtcggagcggcgtcggcattgccggctttggctccggctgcatcagctgaatcggtgccggccgcactggcgttagcactatcgtcagcgttggcaccgccggctttggccttggcatcagccgcgctcccgccatcgatcaccagtcgcagataatcgcggtcggcggacttgcggcgcggcacgaaacgactgatgatggagtccttcttgccgcggttcttcacgtacaggaaaccgaacacggagaacacgaccgcgccgatgaagttgacgaccagatcctccatcgtgtcgatcagaccgatgtcgaggtagccgccgaggcccaggtcttggccattgaccgtgacctgggtaatgtcgttgatgcgaatcgcatggttggtgtgcgtggggtcgagcatcaccgagctgatggaatgcacgatggcgtccttctgcatgtcgaacccgaacaactggtccatgccgaattcgaagaactcccagatcacgccgatggtcatggagaagcagaaggacacgatcgccagatacaggggcgaaagctcgaacttcacccggtcggaccggttgagcaggtcgaccagcgagaagccgatcgccgcagcgaggaagccgttcatcgtatgcaacaccgtgtcccagaacgggaagatctcatagaacgaactgatctcgccaagaatctcagccgagaacacgaacaccagcacgatgacttccagcaccgaaggcagctcgatgcggaactgcacctggatgaacgccggcgccaacagcagcagcaacgtcaggatgcacaggaacacattttcgtagtcgccgttaaagaactggagtattgccatggcgagcaccagcatgcgcagcaccacatagaccgcgaatgagcttttgtgttcgcggatttccatgcccacggctcggctcatggttttccagcgtacgcgccaggacggtttgcgttgtgcgtcgtgctgttgcgactgtttccgggtcatccttacctctttctcgcattgttctcgcgccagtctatccgaacctgctcacaggcaatcggcaagaacgggcgatagtctggccgcacgaaccgaacggaaaccgatactgtctcgattgtgggccacgcgaatcatccgacaatgctcgatgaggccattacgccggctcctcatggctactggtcatcatggccatgccggtagtttgggctatcgtgaggtgtgcgagatgggctttgtgccggctggcagcaaatccaagcagcgaaacaacggaatgaacgaagcgaaaggaacggtatctgatgactccgattgaattgtcaacccgacgccgggttacgggactgacttcggatgagttcgccaggctgttcgtctctttgcagcgtgaagtggacggcgaagccgcgcattggagcgccacggatgtcgaatcctgggagctggtcggcccgccggtgaccgccgaacagcatctcatcgacacgttcgccgcggccaacgaattcgtagccacgcttgcggaccgtctgtaccgcacgatcatgccagtcacggaagaatcggtcatcaccgcatacgctgatgacctcacattctgggcatcgcatccggaccttggcggagtgccgtgcgcattatggaacatcgccgcactgcaggcggctgaatgggcccgcaaggaaaccggcatcgcctgtgaactggacgtgcgcgaaccgctggtgtgacagctgagctcaaacatgcgtaggtaacggcatggtttgaggactatggtgttgcgttaccggtcggaaaggatatgatggtggggcgtcatagcaaaaaagcgcgtggccagtcgaggagacatgcgcgaaagtcctccgtttggagtgaaattcgcggctatctgctgacggtgatcgcggtgatgctggtcgtgttgctgggacgcaccttcgtgttcaacgtctatgtgattccatcccgtagcatggaagacacgttgcaaatcggcgaccgcgtatttgcctcgcgattgactccgagactctttgcactgcaccgtggcggcatcatcgtgttcaaagatcccgcagactggatggagggggagcagcttcccaccaatttgatgtcgataatcgacagcaatcgttacctaatcaaacgtgtcatcggtctgcccggcgataccgtcgcctgcaagggatccggggagcccatcacggtcaacggcaaacccattgatgaaagcgcttatcttaagtccggcgtgaatccaagcgacagtcctttttccgtaaccgttactgacggcaacgtgttcgtacttggtgataatcgctccaattccagagattctcgataccatcttgacgacggcaacaatgggctagtgccatacgacgatatccaaggtgtggcgttgttccgcttctggccatttacgagaatcggcatactgaactgagtttggcgtgaatccacgagttgatacgtgccgcacggtccggtgcatcctgcagccggaccgttaccggaaccctccccccgaaatctgacgacccccctgtctcacagctatcgtacagctccgatacgggaaacgtgcgggtgattccataacgactacgtacttcaggaagtgacgtgtatcacactatggtcatgtgttcagtgccgcagataggcgaagtttattcatgagccgaatagggccggtgaagcgggctctcactgcgttcataatacggcatatcgtgaacggcgttatcatcacagtcaggccgaattaaaggaggctcggtcatggtcgccgcatccacggcattcagcccgtcaagcacgatgacggccagtttggtggaatcgactggcctgcccagtgccgctattcctgtgcacgaggatggtaacaacggcaacggcgacagtagtgccgatggcagcggcgacgacggcggcatggtcagatcgctgagcctgtggaactacttcaccatgggattcggcgcaatcatcggcaccgtatgggtgctgctggtcggtgactggatgatcgtcggcggtggcccggtcgaggcgatgatcgccttcgtgctgggcgccgtgtttctgctgccgatcggctcgacgtccggcgcggttaccatggtcgggtcgtttctgcccggagtgctggtgatgacgccgctcttctacaccggtttcgacacgattccgcagagtgccgaagaggcaagcgaaggccttgactggaagaagttcggtatggtcatctcagcttcgctgctggccgccggcctaatcatcattggcctgcaggtgctgccgttctccccggccgcgctcaaacccacatcatgggcaatcgtggcggtgtggatttgctgggtctggcattgcgttggatcagtgcacgttcacggcgcgaatagcggtgcgccggtaggtcgcgagccgttcagtcgcgcgcgacccaaagcgtatcgaggtcgtcggcctcggtcgcctttttgcgcttgcgtacccactgttgcaggaaatacgccccatagcaggccacgatgaacacgagctcggccacgagcgcgaaccgttgctccacgtcgaaaatcaccaatacgaacgatgcggtgcacaggatgaacgccgcccaagacacgtacggatagccgggcgtgcggtatttgagttcgctggtggaatggccggactccagccaacggcgacggaacacgatctggcagtaggcgatggcgatccacaccaccacggcggacaggccggaaagcgccaccagcaccaggtacacagtcgaggcggcgatcacggaagacaggagcgccagcaggccaccggccatcgcggcgcacaaggcgagcatcggcacgccgcgacggttcgttttggcgaaccagcgcggaatcatgccttcgttgcccatcgaccacaccatgcgcgtggaggcgtacaggccggaattcgaggcggagagcacggccgtgagcaccacgaagttcatgatgtctcccgcataggggatgcctatgccgttgaacacgagcacgaacgggctttcgcccacgccggccttgcgccacgggatcagcgcgcacatcacggtgattgagccgatgaagaagagcaccagacgccacagggtggtgtggatggctttcggcacggcggtttgcgggtccctcgtctcaccggcggtcacgccgatgagttcggtgccggagaacgcgaagttgacggtcagaatcgtggcgaacaccggcatgaagccgttggggaagacgccgtccttgatgagattgacgaacatcggggcatgttggtagccggcgaccgggatgacgccgaagatggcgagcgatccgatgacgatgaacgcgcagatggcgaacaccttgatcgaggcgaaccagaattccgcttcggcgaagagccgcaccgacaaggcgtttaaggtgaagatgagaatgatgcacgccgcgctccacacccatgtggggctgtccgggaaccagcgttgcatgagcaggccggcggcggtgaattcggagccgagcgccaccgtccaggtgagccaatactggattgcgatcacgaagccggtgccagggccgatgaacttctcggcatacacatggaaggagccggtcaccggcatggccacggacagttcgccgagcgtgagcatgaccaggtagacgatcagcgcgccgatgctgtatgccaggatcgtgccgatggggcccgcctgctggatggtgtatccggagctcaggaacaggccggtgccgatcacgccgcctaatgagatcatctgcaggtgacgggattccatgccgcgcttcaggttggtatgtagggcgtgctcgtctttgccatcatgtgacgactcggactggctggtttgcgctggttgattcatctgttccgaatggcttcgacggccatccgtctgaatctgcggttcttgttgcgaggacggcgactgtgccgccgtgtcggtgtcgggctgactcatgtttctctctttgccatgcgtgcgttccataggcgtcgtcgtgacggcccggaatagtatacccgcaccgaggatatagctgcgctgcatgatgctgagtcaaaatcagcttcaaggggctgatttggcgtttgccggaggtctacttccgtttcaaggggctggtcaactggcggaacgcagatagaaatggcattgttctatcgctattccgccgtttttaaccagtggctactttggcatcagccccttgaaacggaagtagatgttccgcaaagtcaaaatcagccccttgaaacggagataggcactcgcagcggctacttcaccttctggatacgcagcacgaacacggcagcgcacacggccatgacgatggagatggcgaacgccggcgtgtaggtgccggtcgtggtcttgaccacggaggtgatggtgggaccgactgcttggccgagcgtggtggccaggttgaggatgccgaggcccttaccggcctcttccttgttcggcagcacgtcgacgttgagcgcttggtcgatggctgagtacacgccgtagccgaagccggcgatgcccgcatacaggtacatgcccgtgacgctcggcatgatccacggcatcgcggtgccaatcgcgaacagcagcgaggcgatgatgactggtaccttgtgcgtgtgcatcttgtcggagatcgggccggagatcagcgaagcggtcagggaaacgaccatggtgatgatggacatggtggcgatggtgccggcagcctcggtcttggtctggtgcacgtaatcctcgacgatgtagagttggtacacggagatcatctggtagctgagcaacatgcacactcggcagccgaacgccttgtagaagtcacgcgaggtggagaacttcgggaagtggaaggagacagcgagatccttgagcgtcatcttggtgcgttccatgtcctttgaggattcctcgcgaggtcagatgtcaagcgccacgaatccggaagcccatgatcacggcgccgatgatgaagccggcttgcgcattgttgatcatgcgagagccgatcatggtgccgatgggctggccggtgaccatgccgccgccgtagaaggagtcggtgccgcacagcttaggcatcgcgattatgtgcctcgtgctcatcatccgtatctgtctattgcctctcttcttctcccaaatgcgcgcgacgcagcgtatgcaggtgctccaaccgcaaatccaacgtatccaacgcaagtacgccgcgcgtaaggatccgcgttccaaagaagccatgcaacgtgaaattatggctttgcagcagcggcataacgccaatccgctcggttcatacctgcttcgctgattcaggcgccgattctgtgctcgctgttctacacgctgcaatccctgcccgcaagcgccgccgggaatgcggaaccgttgagcggcatcgaccgcgtcatggcgggcgacatcgaatcatcgtccatattcggcgtgcgcatcgccgactcgttcggcacggtcgtctcgccgcagtcgcacgtcgtcatcggcgtggccgtggcgttgatgtgtctgatgttgttcgcgatgcagtggctgctcatccatcgcaatacgccgaaggacgccatggattcaccgcagttccgcacgcagaagctgaccgcgtttgtgttcccggccatctacgtggtgtcgggcggcaccttgccgttcggcgtgctgctgtactggctgaccaataacctgtggaacttcggccagacgctctgccaactgcgatggtttccggcgcccggatccgaggcggggagcgcaaggccgaacgcgaccatgagcgggagaaccggcaccgcgccgcctccggattgccgtctttggaagaagagcgcgcggcggccgcgcgtgaggaggcccacgtgcgccgcgagcgtgaaaagtcggtcgccagccgcaatcgcagacagcgcaagaacgtgcagctcgccaagcgttgatggcacatgggagaggttacgggggatgcgctgagaccctcgtccccggaacggttcgaagtgctatactgcttgcactacgctgcgatgcctgagtgcaaacggatccaagaccttacgatgacaggatgaacgatgatggccacgaaccgcacattactggaacaggcccgagaattgcaggcgctggcccagaccggactgatgtactgcaaggaccccttcgaccgggagcgctacgagcgtatccgcgcgatggcggtcgacatgctctccacgcaggttgatgcgccggccggacaggtgagtcgactgctcagcgccggatatccgacgccgaaactcgacactcgtgcggccatcttcgatgaagaaggcaggatcctcatgacgcatgagaacagcggggaatggtcactgcccggaggctgggtcgacgagaaccagtccattcggtccaacgccgtcaaggaggtcaaggaggagactgggctcgatgtgaggggcgagcgactcatcgcggtgcaggactgcgccaatcacaacgcgctgacctatccgtacggggtgctcaagttcttcgtattgtgcagccgcgccggcggttggttctcggccaacatcgaaacgacggaaatccgctacttcgaggaagaccggttgccgcggctttcggaaacaagaaacaccgcggaacaaatcgccatgtgttttgcggcccaccgcgatcccgactggatgacgctatttgagtgaaccccgtgaaggcatccgcacatgcgcgttgcgcggcgccgcctggtcatcgtgccgacggcgagcatcggttccgaacactgacgccgaaccgtcgaagccgttcctgtggaaaatccgtgtccaggccatgcagaaccaggtggccatcgtcatgtgcaaccgggtcggcaaggaaggcgatgtgacgttcgccggccaatcggtggtggtggacccgtacggcaacgtcgtcagcaaggccgacgaccaagaacagttgattatcgtcgacatcgatctcacacagaccgcagcagcgcgcaaacagcggccattcctggaactgcgacgacccgaatggtacgactgaaggggcgaatgggtaataagcaatgtcacgattcgccgcacccatcagccgcattcgtgccggcctacagatacatgaccatacgcagattgcagccagctggtgcaaggcgggaatgtgaagtcattgtgcgtttgcttcgcgaagccgcgcaatgccggattcaaagcagctgctcatcattgctatggatgcgggactgaatggtcacttctcttggaccgccggtctcactgggagctagcgcgtcaccgtcgttgttccagaagcgcaatgcgccttgtcgggtctcatcgttgacggatagcaagagatctccctcaaatagtgtgcgtgctgtgcgatgctccgaacgagcatcttgatgttctgcacgaagcatgaggttcctgccccaacgatccggcatgcagtcttgaaagatgcgatgcatcgcattatgctcggccgggaacgttccggggggagaggggcatctctggacagagggatactgcgtttgaagagcgcatataggccgtatcgtatgtgaaatgtgccgattcgatgccgcgcctgatactggtgaataatttcccgacggtgacgtctgtgccgttgaactgcagggtgacgattgcttccatgatgtgttgcgcctcctgctgtactatcgaatacgttttggagtgtcttcgtcggcgcgtaatttgccgatatctgtgttaagagggtccgtcgcttgctgtacgccgtccagcagtccaagcagacgagcaatgcggaggaagttctcaaagctgccattacccgtacgcagcattttggtgaccgttggcatggataatccagcccgctcggccagcaaggctacgggaatgcgctgttgtctgcgcgccaaatcgaggttggcggatatctgacgcatcgcccgactgaccgggattggtgtgcgtgtcggcatattggcacctcctatcccaaatttaaacataaatttgtatggactagccttatgcggaggttacgccaatatacgacaagaacgaaccaacgtcagcccggaatcttttcgacgatggtgttcaaggtgtcgaaagtctcatcgatttggtccactacctgcttgccctggttgaccatttcggtgatctgttccgtgcggggttgcggcagcgcatgaatcgacgtcttgacgcgcttcaagaccgcaccggcgtcggacaggtcctgcttgatggaagcgattttgggaatggaaagcgtgccgtcggagaagttcatgccggacagcagctcttcgatattgaagtccaccaacgtgccctgcgcggcactgtcgattttgggcagggcgttggtcgcggcgtcggcggccgcatccagcatgccgcgcaccgccttcacgtccgaaccgtaatacagcacgtattcggcggcctgccatagcatgccctgggtttcgtctcgcgccgcgacgatgtgactgccagcgctgtccatctgctcaagcgcctgcttgaagtcgccctgcccgacggattgctgtgcttcagccgcatattcgcccgcctgctgcgcctcgccgatcacccgttgtaccgactgccagaacagccagccggaaacgcccaccgccagcagagccgcgaccagtatcgtgagaattacggtgccgatatgtttgcgcttagccataggaccaatgtaccttttgtcccatctagcgccattgtgttctggcctttagtccatcaaagtgtccaacagacttgtcttctctgaagaagcgcatggaaatcagttatagtcgattctctcctgtagctggcgaaaaacagatatagttgaattggactaacgggttttatgtagggatgccgaggaggacaaccatgaatcaggggagggctcgactggaacgaattcggtgatggagggctttgcgaaatccccggtcaatcgatttgctgactggttgggatggggattcgtcttcctcggagcgggtataggagcgtttctgggtgtcgtcgcgtacgttcaacactggattagctgacggcttcgaatagttctccgaccgcttctcggatttgccgggtggcatgaggttttcgaccgctcacgtagtggcggcgacctcacgctaatcagtaatacacactttgatctagcagaccctacggctaaggctaggaggccgacgatgggaaaccgcgtatggaaaggtgaaccttccgccggtggccgggccggaacgatcatcgctttgggcatcgcggcgttggtagtggcgggagtatggttcggatggactcgatactagggctatagtccggtttcgaatctgtcgcagacgttctcgatctcattttccgaggatgcgcgggcaatcgtcagcaaggacgaggaaagctttcatggggacggataccggtacgtgaaggtcgccgctgacccagaacaagtcgacggcaccattctggacggcagggattactccagtggccaactgccccaggagaacatccgcataatcaaggaagcggatgcgaccctgcgattgaacctgggaacacagctcgatgcgctctacgaccggcctcataaggagataaccaacgagggcggcacgctgatcatcatccatgatgccgattcctcggaatggcatttcttcgaatgcctcgtctgaaagctgagcactcccgaaacatatgcgattgtcctgaagaagagcccagaccaaccaggccccgattatccagataaaaagaaacccccagtgcatcacggctgagtcgaagaccgtccggagaggccctttgggggaattcttgatatatcataatgagccatgagccgacagtcaaattcaacaactgatttcctctcacggactccaaggaaaggaagtccgcgggagaaggcgctgcgcgcgtgcattaccgatgaacggcttgccacctacaattatgaggctcaaagacgttcatgcccagcgctagagctgtacctgtgggatcacgacatggccagcgcctgtatgggcgacatcgccatcctcgaggtcgctctgcgcaaccgcatggaccggcaactctccctcctcgctctggagcagaatggcactgaagactggtatatggcagggctacaattcgatgaccgaacccagtaccagattcgtgaagcgtggaaccatctcaccccgcaccagcgaaaaaatcatacgcatggccatctcatagcgtcattgacattcggattttggcgcaatctcttggaagacggcggaacaatccacacgaagtggccagaccagcgccgtgcagattatgagaacgatttatggcgcaaaggactcgataagacattctccaatgggcgccagtatgcccgtgcagtggaagaacgctggacgagaaagtacgcgctggatatcgtaaaaacagtgcatgccctgcgtaatcgggtcgctcaccatgagccgcttgtcaacggcatacctctgccgggtgagaatcgacggattgcattggagaatgcgacgcaggcgtgcttcgctctggcgatgatcctggaccgagacctacacgcatggttgatggataacagcaagatgaaacttgtgctcgaacacgagctgaagcctaatgaataggtagtgagtatcgttttcgccaatcatctcttcagtgggaatggcaatgagctgcagcgacaccaacagattccttaggatccgacaccggcacgtccggcctggtatgcgggttatggcaatgctcgatcgccaccgcgggcgaacccgtgccccacatgacatggaagtccttggatacggccgagatcatcgcgcacatcgcatccagggcgaacggatcattgtccaatacgggcgatacggatcgaccgcgccgcagccccggtcatgtcatcatgtcccatgccgctcatcgtggccacggtcgcagccggacaaaacctgctatcatgcgattacttgacacgatgttgcgcttttggccatgcgcaggttgaatgggattgcgccacgaaaggatatgccatgaacgatctgctgattatcgacatgctgcccacgtacgggctgctgttctacctgctgatctcggtattcgtcttcgtgggatgccgtggtctgcgccggaggacctcggatcgtggcctgctgcgttttgccgtaggcgcgttcttggttgtttccgcgctcggcgccgtgttcgctgcgctggtgtatatcatggcagcgcctttggcgcagccggatatggtcgacttctaccgcatgtaccggccaggagctctgatcttcctgctgggattgttcatcatacaatttgtcttcggcgtcgctgccgtgtatcggggaaagtaacctggtatatcctgcgataaacgcattggcagacacttgctgcctatctgtaaacacaccctagataaggcttgcggccgttggtcgagcacagtagtagtgtggtctgctgtgtcaacaggaggagtatgaccaatgcggctgattgagacatggctggcggaccaggaacgcgcgtttgacttgttcgcgaaattcccggcggaagagacgggattcgagaacccagcggccggcatgaatcgtgaacggttcgccgcatatgtgcgagggttgcgtgatgagtcgcttggcgtcggcctgccggacggctgggtgccagccaccaaatacattctcgtcaacgatgagggcgactatgtgggcatcttcaacctgcgtcaccggctcaccgacttcctgcgcaacggtccgggccacatcggctacggtgtcgcccgcgaataccgcggtcacggctacgcgaccgccgggctcaagctcacgcttgccaaggcccgcgagctcggcatcaaggaggcttacctgagtgtccacaaaaccaatccggcaagtcttgcggtgcagcagcattgcggcgcacgtatcgaccatgaggacaagacggaatactacacacgcatcgccacctgcacggagagcgatggcctctatgcgcgaggcgattgacggcgcctcttgcgtgtaaatggccgattatcaatcggttttaatcgatttcgcctcggtcgataaagtcgccgtcgaggaaccaataatcgtgcggatttccgcgtaacgccatgaacggcgtgagttccacgccctgtgtctcagatctgctcagcagataggctcggataatccacggatactccagcacgcccgacttgagggtgatgatttgctccactctgctgccgctgacgccaaaatccctgccgccgttcggcggtcagacccagccggctcatgttctcctgaaattcgcggatagtcgccgcgcgttgctcactgttcaaagacatggcttcatggtagcgccggacgcgtgtgggaggtcgggctgctcactggaatacgccgtcagagtagttgatcatttcgagttccgggcccatgtcttcggtttgagtcaggccggtctcatggaagccgatgtgacggtagaaaccttgggcgttggtgttgaatccggcgacccacaaggcgagccgatcgttgccgatggcgcgttggcccgcctcaaccaaagcacggccaacaccatgacgatggcaagattccaacacatatagcgaagccagttccgcagcctcggaccgtttgattggcgaacgcggcgtttgcagaagctcagcaaaaccaatcacgtggttgttctccaaagcgaccaatacgacctgattggggtctttggcgtggctgcgcgtcagtttgagcgcgaattcgggagtgatcgcatccacgatttcctgcggaatatgcccctgattgagttcgcgccacgtgcacgactgaacttgggccttttcctcaaaccatggcggctcaatcgaaacaatacgaatcgtcatgccgcccatagtaggccggttcgtgagtacagtgtcacttgttgtcatgtgattgcttggcatcaggttgtattgaccgtaatggaggccactggatcagcgccggaaactcatggaattcgggctattatgatgggagtaagaaaagcacagcacaattgaacataaagacgatctggagcattgcatgagcgtcaatacggcatttgaaaccagtgatttgcccaaagcggagtttatgtttcctgggcctgaacgcgatcgcttggtgaagctcattctggacggcgtaaaaaccgccaccgctgcgctgatgattgaatatgaggaagaggtcgaaccgctgccgtgcgttggcgcgcattcggtgttggtggattccgatgaacgacccgtagccgtactcgtcaccactgcggttgacgtgattccgctcggaaaagtcactgaccggtacgccatcgatgagggtgaaggcgacgtcacggcggcccaatggcggagcgcacacgaatctttctggaattcggcggaataccgcgatgaattcgccaacccaaactttccgttgaacgacaactcgctcatagtattcgagcatttcgaagtcgagcaacggttggagtcgaataacgcattaggttaggcgatagcaaaacttttcttcaggcaactctccgagctccgcaacatctgaaggaatgcccatgtccactagagcgacagaagcggaaagcgtattgaaggagcatatgggatatcttccggtatcggaaatggagcgtcgaggagtttcccgcacggagatttcgcgattcgtgcgtgaagccaagcttgagaaagcggcaaagggcttatatgtttcaccgaatgcggagtccgatccgctgttcgaattgcagtatcgatatccgaaagccattttttcgcatgaaactgcgttgttcttgcttggagagggggagcgagccccccctgacaccgacgattaccttactgcaatcatcaggtacggctcgtctcaagaatgaagacgtaacagtgagaaaggtggccgacaatcgctttacaattggcctggcgtcggctatcactatgttcgggcatacggttcgcgtttatgatttggaacgaaccatttgcgatttgttccgctcccgcagcacagtggatccgcaagatttgcaatccgccttccagaattacatgagattcgcgcacactgacttggtcaaactcatgaactacgctcgcgaatttcggctcgtgaacgtgatgcgcccttacctcgaagcggtgatgccggcatggttcaccggcgaattcatcttgtaggcagattcagcatcttgtaggtagctggccttggcgagaggtcattgcaatggcggtattccgatcatcgccattggaatcatctgcctacaagagcacgaaacaccctacaagatgagacgggccagttgggtcagtcccattcatcctgccggttcgcaggccgcaattgtcagtcacaactggtgcatcttcctcatccatgcgaatgatacgaatcgcctttcatcccaatgatttcgctctcatggccgatacccgcatgccgtcatgttccgtaccttggagtcagaagtcgagagtcatggtccgaaaccgaacggagcgggccgaagcagggagcattgaagatgggatttcttaagaacttttccgaaccgtttgcgttcgcgctggcattgtggccgtttgtgtccatgctgctgacggtgccggtgctggcgctgctgtatcaccgcgacaatcgcatccgactgtcgtcggccatagtggcgtacggcacggtgctgtacctgctcggtctgctgtgtttcacactgtatccgatgccggccgatgcggcggcctattgcgccgcgcaccatctgacgccgcagctcaatccattgcagttcatcggcgacattcgtaccgatggtctcaccgccgtactgcaaatcgcgtttaatatcgtgttcttcctgccgttgggcttcatcatgggccgtatctggcgttggccgctgccggttaccgcagtactgtcgttcgccacgtcgctgtttctggagacgatgcagctgaccggcctcatgggcgtgttcccgtgcgcctaccgtctgttcgatgtggacgatctcctgtggaacacgaccggcgcgctgatcggattcgcgctggccatactttcgctgcgcctgattccggcgcgggtcgccgatatgacgccgactaccacacctggcttcatgaggcggctgatcacgttcatcatcgacatgacgctgatcgcgttcgccgtgatgccgacgcatctgttcgtcatgatcgtccgctcgaacctgccctcgggctccaatggctcatggcagtcgatggaaccgttcgactggaccggctcgatcctcttcctggcggcgctcatcatctttgaaggcgtggtcccctggctgcgcggcggctgcacgctcggcggcagtttcacgcacatgacgatagagacccggccgcgcgaagggcggcttcgcgtggcgttctatgtggcgcgcatggcgacgctgatcgccgtggtgtggtggcatagcggcggattcaatctgctggtgttcatcggcctcggcatcttctggatggtcaagcatcagatgccgtacgacctgatataagacgtaattcgccgaaaaagtggggttcttggctttcaaggggctgatttctttcgccgggaacatctacttggctttcgaggggctgctcaaacgccaaaccgcgagtataaacggctttgcggcaacgccattacgccattgtggagccttgtctactcgggcatcagccccttgaaacggagatagatctccggcaagtgccaaatcagcccctcgaaatcgagttaggcgttgttttcgcgtttgcgctgccgttcgagggcgtaatagaccgcataacagcaggcgacgaacggaatcatgcaatacagggtcgaacgttgcgtctcatcgagcaccacaagcaccagcgcgccgatgcacatcacgatggccagccacggcagcaccgggaaaccgggcgcacggtagtcgagctcatcggcgctgtgcccatcccacgcccattcgcgccggaaacggatatggcacacgcacacggagaaccacaccaccagcgtcgccaaaccggataccgcgaccaacaccagatacacggtcgaggcggcgatcacggaagacagcaacgccagcagcgagcccgccatgctgaacagcacggcccacaccggcacaccacggaaattcgtcttggcgaaacgttcgggaatcagccgctccttggccagcgaccataccatgcgcgaacaccaccacaatgaacacggccgaccacacccaggacggcgaatgcgggaaccatcgctgcatcagcagcccggccgccgtgaactccgatgcgagcgccaccgcccagttcagccaatacaggatagcaatggtgaacgcggtgccggggccgatgaaccgcttctcatacatgtggaagctgccggcatacggcatggccacggacagctcgcccagcgagaccatcacacagtagacgagcagggagccgaccgcataagcgaggattgcgcccagtggccccgcctgatgaatcgtatagccggagctgacgaacagaccggtgccaatcacaccgcccagggaaatcatcgtcaggtggcgcgactccatcttccgttcaaggccggtatcgtccttgggtgtgccggctgccgccatgatcgggtctcctttggtcgggtgaacagttgtgtctcgtgtcggttgtgcgggcggcgctcgatgctgcctaccatatgatagcggtaacacgaacagtgagtggaacacgaggagtttggaatgacggaactgtatatcggctcgcatctgtcgacggccggcggatggaatgcgctgctggaacgctcccatgaggagggcggcaccgcgttcgcgttcttcccgcgttccccgtacggcaagcgttcgaaggcgctcgacccggccggcgcggcggcgttcggtgcgcgtctgaaggctgagggctatgggccgttggtcgtccacgcgccgtacgtctacaatctggccggcaaggatgaggccaagcgcgcattcgcgatcgaggcgttggccgaggacatcgagctgctgaccgccatccgcgaggccggccaggaggtgtatatcaatattcatcccggcgcgcatgtgggccaaggctccgagaccggctgccggctgatcagcgagggactgaatcaggtgttcgagcgtacgaccggcgtcatggtgcttctggagaccatggccggcaaaggcacggaatgtggccgcaatttcgatgagctcgccacgatcatggatggcgtggagaataaggcgaacgtcggcgtcacgttcgacacctgccatgtgttggatgccggctacgatttggtgaacgactacggcggtgtgatgcgccagttggatgaggtgatcggcttggccagggtcaaagcgattcatgtgaacgattcgcagttcggccttggctcgcataaggaccgtcacgccaacatcggcgaagggcagctcggcatcccgttcttcacgcgactggtcaacgatccgaccatggccaagctcccgatgattctcgagaccaaggagcagacgccgaccacgcaccgcgacgaaatcgcgctgctgcgcgggctggtggactgaatcacatcggcagttcagcaccaccaccggcagcaacggcacctactggtccgcctaccaacgttgacatcgttgtcacgcgaacttcatgtaccacaattccacaatataatttcatagttatgacactgtgatacatatatagcaagcattgattcagtgacgatctctcgtcaaagatgttccgtcaaaacaggcgcatgggctcggtcgaatccaacggctgaatcaggcgtttgccgtcgccctgcagcggggcgacctcgtgaaattgcaagcggcgggataacgcagtgcctgagttccgcacgccggcgagcaaggatgcgccgtcgattgtgcggtccagccacggcgtcccattccaagtcgagcgcgaaacgtctgcacatgcgtgccagtttatgccaatgttctgcctaagccggaatcgcctgcgaaagcccaaaatgtaggacgggttcggcaatcgggacaggacgtgacctagagtggcgcatgaccgaacaccaacaaagggaggaccatgtcggttttggacgaactggtggcgggagcgctggaggatcagcgcacccgtgagctcaccgtatcgcttgaggatgtgaagaaggccacgctggcggccccggctccgattgacgcgacacgatggcttaagcgcgccgacggcatccccgtgatcgccgagatcaagcgcgcgtctccgtccaagggccacctgtccgacatcccggacccggccgcgctggcccgcgagtacgagaagggcggcgcaagcgccatctccgtgctcaccgaaggccgcaaattcctcggcagccttgacgatttcgacaaggtccgcgccgccgtgcacattccagtgctgcgcaaggacttcatcgtcaccgactaccagatcttcgaggcccgcgcccacggcgccgacctggtgctgctcatcgtcgccgcattggacgacgcccagctcaagcacctgctcgacctggcgcacgagctcggcatgaccgtgctggtggagacgcacacccgcgaagagatcgaacgcgcccgcaaggccggtgccaaggtgatcggcatcaacgcgcgcaacctgaagaacctcaaggtggacgtgaacaaatacaacgaactcgcggccgatctgcccgatgacgtcatcaaggtggcggaatccggcgtattcggcgcggtcgaggtcgaagactacgcccgcgcgggagcggacgcggtactggtcggcgagggcgtggccaccgccgacaatcatgaacttgcagtggaacgactagtaaaggcaggagcacaagtgaaagcatccgaaacgaccccgctcagcgaacatcagggaccgtattggggccagttcggtggccgctatgtgcccgaggccctcatcaccgccctcgacgagcttgagcgcgtgtacacgcaagccaaggccgaccccgaattccacaaggaattcatgacgctccagcagcgttacgtggggcgcccgagcccgctgaccgaagccccgcgcttctccgcacttgtcaaagagaagactggtctcgacgcccgtatcttcctcaagcgcgaggacttgaaccacaccggcgcgcacaagatcaacaacgcgctcggccaggccctgctcgtcaagcgcatgggcaagacccgcgtgatcgccgagaccggcgccggccagcacggcgtggccaccgccaccgtgtgcgccatgctcggcctcaagtgccgcatctacatgggccagatcgacgcccgccgtcaggccctcaacgtggcccgcatgcgtatgctcggcgccgaagtggtcgaggtgacccttggcgacaagatcctgaaggacgccatcaacgaagccctgcgcgactgggtcaccaacgtcaaggacacgcactacctgctcggcaccgtcgcgggcccgcacccgttcccggccatggtgcgcgacttccagaagatcatcggcgaggaggccaagcagcagctccaggactggtacggcatcgaccatccggacgcgatctgcgcctgcgtgggcggcggctccaacgccatcggcgtgatgaacgccttcctggacgacgagcgcgtgaacctctacggctacgaagccggcggcaacggccccgaatccggcaagcacgccatccgcttcgcccccggcaccggccagctcggcatgttccagggcgccaagagctacctgctggaaaccgacgaaggccagacgctcgacacctactcgatttccgcaggcctcgactacgcttccgtgggccccgagcacgcatggctcaaggacatcggccgcgtgaactacagctgggccaccgacgaggaggccatgaacgccttccgcgacctgagccagactgagggcatcatccccgccatcgaaagctcgcacgccgtggccggcgcgtacaaggccgccgccgatctgaaagccaagggctatgacaaggccgtgatgatcgtgaacatctccggccgaggcgacaaggacatggccaccgccggtaagtggttcggctacctgaccgacgatcaggccgccgcgctcgatgtggccggcgcccacggcaatactgtcgcctgaacaagaagaggagatttttgattatgaccaacgaagcaaccacgccgtccggccagccgctgggcatcagccacaagcccagcaagtcgggcgctatgttcaccaagttcaaggccgagaacaagcctgccttcatcggctacctgccctatggcttcccgaacccggacgtctcgcttgatgccttcaagacgatggtcgagcacggcgtcgacgccgtggagatcggcctgccgtactccgacccggtcatggacggcccggtcatccaggctgccgcctccatcgccctgaacaacggcgagaccatcaagcgcgtgttcgaggccgtcgaaaccgtggccaacgccggcggcgtgccgctcatcatgagctactggaacctcgtgtaccactacggcgtcgagcgtttcgcccgcgacttcgagaacgccggcggcgccggcctcatcaccccggaccttatcccggacgaggcgggggagtggatcgaagcctccgaccgccacggactcgaccgcatcttcctggtctccccggactcgtccaccgagcgcctcgaaaccgtggcccgcaacgcacgtggcttcgtgtacgcggccgcccgcatgggcgtcaccggcgaacgcgccaccatcgacgcctcgcccgaactcctcgtggaacgtacccgtcaggccggtgccgagaacgtgtgcgtgggcatcggcgtgtccaccgccgaacagggcgccaaggtcggctcctacgcggacggcgtcatcgtcggctccgcgctcgtgcacaccctgctcgcggacgacaacaagaccgcacgcgacccgaaggaaggcttgaagctgcttgccgccaagagcgaggaactggccgaaggcatccacaacgcccggtaaacacccggtgtgcctcacgcgggttgtgccgtgacacggtagggtagtcacagagcatcaagcacaacccgcgcgtggacacacaccatgagcaccagcaagtagaggcacgatgaatctggcttatattccctcgccgaccttctccaagttcgagatcggcccgttcactatccacatgtacgcgatctgcatcctgatcggcatctgcgtggccgtatggatcctcgccacacgttggaagcggtacggcggcaccttcgaccagattctcgataccacgctcgtcaccgtgccctgcgcactggtgggcgcgcgcctttaccactgcatcaccacgccggccgactacttcccgcccaccggcaacttggtcaacatcctcaaggtgtgggaaggcggcatggccatcttcggcggcatctccgtcggcaccttggtggcgttcctgtggtgccgtcacaagcactatccgttcgcgatcttcgccgatgccatcgcccccgcgctgcccgtggcccaggccatcggccgactcggcaactggttcaaccaagagctctacggctggcccaccacgttgccgtggggcctgaagctcaacgacgcggacgccatcggcaaatccgaaatctgctattctggcgcgcaatgcccggactacaggaccacgctgttccacccgacgttcctgtacgagatgatctggaacctcattggcgccgcgctcatcatctacctcggccacaagcttgccgaccggctcaaggccggccagcagttcgccatgtacctgatgtggtacggcctgggccgcacctggatcgagaacgtgcgcatcaactattccacggtgatcctgggcctgaggaccaacgtgtggaccgcgatcatcgtcttcgtgctcggctgcatcctgttcgtcgtgctctaccagtacgggccggaccccaaggcgcaggcgcgcgggcttgcggcggtcaccgccgacgagctcgaacgccagagcatcgaagaggaacaacttcgccagaaaaagcaagccaatcgcactaagtgacaccacgataaacagcgccgaaacagcgcgaaacacggggctccaagtcccattgcacagataaggtaggaaaccatgagcaatatcgcaatcgcacccagcatcctgtccgctgacttctgcaacctcgaacgtgatctcaaggccatcgccaacgccgacttggtccacgtcgatgtcatggaccatcatttcgtgccgaacctgaccctgggcgagccgatcgtcggccgcatctgtcaggtcaccgatctgccggtcgacgtgcacctcatgatcgaggacccggaccgttgggctcccgaatacgccaagctcggcgccgcctccatctccttccacatgggtgccacccacgcccccgtgcgtctggcccgccagctgcgcgagatgggatgcaaggcctgcttcgccgtgcgtccggccgaaccggtcgagccgatcttcgatatcctcgacgagttcgacatggtcctcatcatgaccgttgagcccggcttcggcggccagaagttcctcgacaaccagatggccaaagtccgccgcctgcgcgatgagatcacccgccgtggcttgaagacccgcatccaagtcgatggcggtgtgagccccaagaccgcgcacatcgtggccgaggccggtgccgacgtgctcgttgccggttccgccgtgtacggcgccgagaatcccgcccaagccattgacgacatccgcgccaaggccgaggccgcgttcaaggcctgagctccaagcctgaaccgcaatccacctttcatccataaccacaagaaaagaatctgaatcacatgaagacgtttgaatccctgttcgccgaactgtccgaaaaggcccagacccgccccgaaggctccctgaccgtcgatgagctcgacaagggtacccacttcatcggcaagaagatcatcgaagaggccggcgagacctggatggccgccgaatacgagggtgcggaccgcaccgccgaggaaatgagccagctgctctaccacgtccaggtcatgatgatcaagcacggcctgacgcttgaggacgtctacaagcacctgtgagaggaacgcaaatgctgagaatcgcagtgcccaacaagggcatgctatccgaacccgcgtggaacatgctggccgaggccggctaccgtctgcgcaccaaccctcgccagctggtcgtgcaagatcccgacaatggcatcgagctgttctacctgcgtccgctcgatatcgccgtatacgtgggccgcggcgccatcgacgtcggcatcaccggccaggatctgctcaagaactccgataccgccgcgctcgagcacatgccgctcggctttggtacctcgaccttccgtttcgccgcaccgaacgaatccccgatcaccactctggaggatgttcagggcaagcgcgtggccaccacattcgataagctcgtacacgactatctggtcgagcacggcatccaggccgagaccatccatctggacggtgcggtcgaatcctccgtgcagctgggcgtggccgacctcatcgccgacgtggtctccaccggtaccaccctgcgcaacgccggcctgcgcgtgtttgccgaaccgctcatgcactccgaagcctgcctgattcgttcgccgcgtctgaacgagcaggactcacgtctggccgtgctgacccgccgtctgcaaggcgtgctcactgcacatcagtatgtgctgatggactatgacattccgatcagcaaggtcgccgccgccgtggccgtgacccccggctttgaaagcccgacgatctccccgctgcacgataaacagtggaacgccgtgcgagtcatggttcccaaggccaaggtcaaccagctgatggatgatttgtacgaagtcggcgcacgcggcatcatcgttaccgctctacaagcctcccgcatgtagactgttagtcgatatgaccaaccagaaagtcaacaccagatacagtccggaagcacgtgacatctatttcaccgtgcccaatttgatcagcgcgctgcgaatcatctcgattcctttcatcagcgtgctgatctccaagcacgagatgattgcggcgttagccctgatcgccatttcctcggcttcggacggactcgacggcatcatcgcgcgcagattcaaccaagtgagcaagatcggtcagattcttgatccgattgccgaccgactgctcgttttctgctcgattctggccctcagcgtcgctggcatcatcccatggtggatgctgattatcgtgggactgagggatctgtggatggcgattcaggtgctatggcttgcccagtacggttatggtccgctgcccgtgcatttcgtgggcaaggccggtaccgcgctgctgatgatttccatcgtcagtctgattttcgccgatttgggcaccagtacgttcttccacttgctctacatcgccgcgctggccgccggcatctggggcatcgccatgtattggctcgccggatatatctataccgagcagggcatcagattgctacgcaaggaactgggggagaagtatggcgcttgaggccacggccccggtctcattccccgtacccaaggagaatgagccggtacgacgccgcgccgtgttctcccactcagtccgaggcgcggaatcacatcatgcgctttccccggatgacgccgccgccatccgcaccagacgtcgccgtaaaaccaacgacgattcgcttcagctcatcgatgatcttgtcaatcgtccgatggatccgatgttctccgactcacgactggtccatgagcatcgttcgaccttctccatctggtttaatcgcatcgtcgtattcatcatctgcgtcggcgttggctttgcctgcagcctattcgtgcaacagttgcaatccgatccgcgtaagcaggtacggcagactttggccacgcaattggagaatcgcaactcgcagatagacgaactcaccacggacgtcaataatttgcgctcccaagttgacgaacagtccaagaaaatatccggcagcgtgaaaagcgatacgcttatccaagacgaaatggtcaatggtgccacggtggtcgaaggcgaaggaatcaccatgacgctggccgatccaatcgcggcaagccagtcggatcaatcctcctcgacgagagtcggcacctccacgaacatccgagtcatcaccgatctggatctgcagcaactggtctccctgatgttccaaaacggagccgaagccattgccatcaacggtaataggctcggcgcgcaaacctcgatacgcaaggccggcgggcatattctcatcggcatgaccgcgatacaaagcccctataccattgaagccataggcgataagagcgccttggccgaagcgatggggaagaagaaacttgcaagtctttacgattccttcaaggaagccggtatctacccgcaggtgagcaaatccaattcgattacacttgaggcagcagtcactggcgaagtgaagtacgcggaaaggaatgaataatggcagccgttctgggactgatcatcggcgtcgtcatcggcgtgttcgtcaagccggacattccgatcatcgtgcagccttatctgccgattatggtggtcgctgctcttgacgccctgctgggtgccgcgcgagcctatttcgagcgcagcttctccgaccgcgtgtttgtgatctccttcctcgccaacgtggtgacggcaacactgctcgtgttcctcggcaaccagctcggcgtcggttcgcagctgcagacagccgtcatcgtcgtactcggcatccgcatcttctccaacgtgtccgcgatcagacgcttcatcttccgaggctgacaagggtactgacgtatggcacgtaaagcacaatcagacaacatgctggagaaaatgcgcgaccagcatgcacaagacaaggtcaacgaccggatggaaaccgggtcgtttcccacggtgcgtaagaagccccggaaggatctcaaccgtgccagcaacaaatcacggttactatcctcgattctcatcgctctgatgtgcgcgttgttgggtttcgcctacatgagccagatcaataacactaaatccacgtacgaaacgatggacgagagtgaactggtaaggctgctgaacgagtcgaatacgcaaatctccaatctcgagcagcgtaaaacccagttgaacagccagctcaactcgctgaaatcggcggctaacgagcaggagcaggcgcgtaagatcgccaagcaaaacgaggagaccagcggcttgatttccggcagactcccggcaaagggccaaggcgtgaccatccgaatcggacgaggcttgacgactaaagtggacgcctcaatcatgttcaaccttatcgaggaacttcgcaatgccggtgccgaggtaatcgccatcaataacgtgcgcgtcatcacctccacctacattcaggacgccgaggaaggtttgatcgtggatggcaccaccatcaagcccgtatacacggtgaaggccattggcaatccgcaggaactgtccaacgcagtcgatatcgccggcggtgtgggcgctcagctccaggtgaaatacgggtccaacgtcaatgtacagccttctgacagcatcattatcgacgaagtacgcgaagctacgcaaaaccagtatgcaaagacggtagaataggggattatgaccaacccgattcctagcgcaggcgaaaccaccattatcggcctgcccgcgattaatgtactgcccattaccaccaccggcgatcgaccgctgactcaagaggatctggacaccatcaccagattgtccgagggaacggcattgctgatttccgccaggggagcggtctcaggttctcgttacttgcttgacgaggatgaaatcaccgtcggccgtgatccgcgagctgatattctgctcgacgactccaccgtatcccgtcagcatgccgtgttccgcagggtcaacggtcagttctttgtggttgacgcaggaagtctgaacggcacctacgtgaaccgtcagcgtgttgatcaggcgacgctgaagaacggcgacgaaatcatgatcggtaaattccgcctcgtgttcttcacgaaatccgccattatttcccaatagtccacacctagcatggggttagactgattgcagaaattgcaatcatgtgattacaccagtgtgagtcatatgcgagacacgcatgagttaggggagtgccatgggacagaccgggctgcatcttcatgtttcgcttgaggaccgtcagaatctgaacgctgacgcgattcagggggagttgttctccaacgtcgatactgaggagatcaagcgcggctaccgtggcactgtggcctccaaggtggccggcatcacgtaccgacagctcgattattgggcacgcaagcagattgttgagccgtccattacgccgtctcatggctccggttcacgacgactatactcgtttaaggatgtggtgattctcgctgtatccaagaagttgcttgatgccggtgtgaatctgcagaacgtgacggcggccatcggattcttgactcaacgcagcaccgatcagctggccaatgtgaccatcatgtgcgatggtcaaaacgtacatgaatgcacaaccagcgaacagatgctcgaactgttgcaaagcggtaaggcagtgttcgccgtgtcggtgggttcgttgtggcaccagattgagacggccttggaacaggaagaatatgttgatcttgaggccaagccgctgacgattgccacgggccgtccgattgatgaactgaccgccatgaggatgcgcaagaagctcgaggcacagcgcttgcgacgcgcaaccgcctgatacatgtatggttgttggcgacttgccggctttggtcggcaggtcgctttgttgtatgtgttgcttttgttgcctgccatcttatgtttttatatgttgcggtgattattatgactgattggaggaccgggtgaacgggattgttgtcggattgttgccgggcgttctgtggatggtcgccgtcatctttgctgtgtccatcatcactataacggtcagccgaggccatctgttcacgccgaaacgccggcgaccgccggtcgatccggtcgactggtcgatggtgaaaacgcatttcatgtcgtttgcggcggcgctgattccgtttcccgtattgacgttcaccgcagatctgatggatgctcgcatgctcgcgttctacgaccacgcgcaattgcccggagcaatcatcatattcgtgctggtgctgctggaactcatcgccatgtatctgcaggcacgcaacgcctcagaaaccgaaatggacaagcgtttgggcgttgcttctcaccggaataaggatgatgttgcgaagtagccgattctctgcggcgaggctaatccgcagctagatactactggttcggctaaaatcaccacgtactattagccgataatttacgttatgtcagattagttatccttgacaaggattcggtcgcctgtatcaactagtccacgcataccaaggccgacagccaaaggagcaccggagcataccaggccgacagccaaaggagcaccggagcgaccaccgcaattgcaagaatcgccgtgcctttcagccaatccttgtcatctcgtttccagtggaatgctcgccaaatgaaccatatcagcatgggaatctcatacagcgacagcaatggcaaaccgatgaaaaccaggtcgaagcccgcggcgcaggctccatcgcatcccatcatgaagaagtcctcgccgttgtgtttcagtgtgtttggaaataacggtttacggcttcttcgatctgctcgggcttctcgatgatttcgtaggcaccgtgttcttccatctcaccggccggagcgtagccccagcggcagccaatggcgtccagattgcaggcgtgggcgccgtcgatgtcggtgtagcggtcgccgatcatcacggccttgtcccccgctgcagcatcaaaaccgattttgtcgaagcagtaccgaatcacctgatccttgtccaaacgagagttatccctggatgcgccatagatgccgtccaacagctcggtcagatggaaatgctcacagatcggaacgcattggtactcgggcttgcagctggccaacgccagataatagccgtcggcacgcagcttgagcagctgttcgcggataccgggaaacacgacgttcaccaagcggccgggaactttgttgccgggctcgttcggatcatcgaacacggcgcgatccgcatagtagctgcggtagatggtgaccgcccggtcaagctcatcctccggcacatggttgcgtcgcagcgattcgatgatggccggaccaatgaaacgatgcagctcggcatcgtcgggaaccgggcgacccaattcctcgaacgtcttgacgacggaggcgatgatgccgccgtcggacttggtaagcgtgccgtcaagatccaacaggaccactttcatcggatgctgtgccattgagattccactcccctttgttcatgtcgactgctttgaatggtcgtcaaacgatatgcgacttgttccaacaatgattatgcccagtcgggatgactgggcatcaagttcacgtgttgttcagtaggagatcactcgtagtcaggaatccaaccgtcacggtgcatttgcaggcgcttttcgagcagggtggccagttcctcttcgctgcggcgttccagcagcatgtcccagtgggtgcgggtgggtttgctgatttcgtcgccctcacggtcggcgtcgccctcacggtgggccacggaaccacaacggcactcccactcgtccgggatttcggcaccctcggcaaacggcaggatggtgcggtggcccttcgggcatacatacgccacatcgtttcgtgcggcgaaatcgacgttgtcgtcggactccagcgatttcgctccgatgctcatgcccctgaggctacgttctgccatatcggcatcctccttgaaagatctttaaccctactaatttacgcaacagttcggacttggccgctattccaagcttccgacgtcggctgacaaactcccatcaaacggccccccgtcagtccacgccggagtaggccaccacgccacgattgacccggtcggccgcttcgtgggcgaggcctgccagccgctctcccccgtcgaacggcagcggctgggcgacagcgatctgctgcagcacgtcagccagtcgtttggcagtgcgcacgaagtcgccgccggtcatgtcggtgccgtacaggcacgatcccagcgaaccgccatccgcccattcatacatgatgtcgagaatgccgaagtccggccgctgcatctcgtccagaccgtgatcctcgcacaggatatcgatgtcttcacagatgcccttgagcttggacgaagcgattgcgatgggcccggagatgccgcccgggtagtgcctcggttcaccgtctcccccgcgtctggcctcgtataccagtgaagagagcacagcggccagtccgttggcgtcgagcttgtcgaacgtgccggcgagcagcgcctcgcacagttccaggtcatgttcactgtagatgcggcgcagcagcgagcctttttcggtcaacgtcatgtcaatgtggccggccgcatcttcatgacgttcgaggtaaccaagcccggtgagaatatcgcagatgcgatcgaactgacgggccacggacccggtacgggagtcgtagcgatcggtgacgcgctgcagttcgcgggtctcgcgggcccagcggtggccccacttgaggtgttgctggaggtctgggcagttgcggcatggatgctcgtgttccgccttgcgcaaatcgcgaatgcgctggtcaaggttctggaaggcgcgtgaacgctcctgatcggtcaggaacacttcgtgcttcagtttgcggcggccttccttttcgatgtcgctcagctccatacgcagggtcatgaactgtttgaagtcgccgtgttcgcatgcgaacgcctgttcgtatccggccagcgcgttcttcagtgtgttgatctgcgattccagctgccaggccgattcgttggcctcccactgggcaaacgactggtccagggtaacgtgcgcggtctcgtagtcgctggagttgagcaggttcacggccatgttgaacgtgggtcggaagctcgagtgcagcgggtagacacgcttggatgacagcgcggcggccgtggcgggcacaaaaccgtgatggtcgaccacgatggcgtggccgatggtgtcgatgccgcgccgaccggcacgaccggtgagctgcgtgaattcgccgggcgtcaggcccacatgaccggtaccgtcgaacttctcgagtttctctaccaccacgcagcgggccggcatattgatgcccaaggccagtgtttccgtggcgaacaccattttgaccagaccttcttcgaacaatcgttcgactatctggcggaacagggcaatcatgccggcatgatgcgaagcgaagccttcttccaacgcaaagcggaacttggagaactgcagggctttcaggtcttcctgagtgagttgcccctccaccatctcatccacgatgcggcgaatcttggtcacttcctcatcggtggtgagctccagtccagcgttgatacactgttccacggcctggtcacaaccgttgcgcgagaagataaagtagatgccgggcaacattcccaggaagttaagctcgtccaccacggcccagcggcgcggggtgtggcgttccgctttcggggcatggttcttggcgcctttgccgccgcggcctctgccgaagcccttgcgcttatcggggcgttcctcgccgcgccggcgtgcggccttgcggtccaactggtcgagccggttgatgagttcggcgttgagcttggtggtctgctcgccgttgccgtcgcggcgatagagatccagcacctcaggctcggtgtgttcgtccgcctgcacgatgacgtgctgttccaaaggcacggggcggtgttcgctgatcaccagtttggtgtcgcctcgcaccgaggcaatccagttggagaaatcctccacgttggacacggtggcggacaggccgacgatcttgaccgtcttgggcaggtggatgatgacttcctcccacacgggcccgcggaaccggtcggccagatagtgcacttcgtcgagaatcacgtagcgcagtgcgttcagcgtggtggaacgctcgtagagcatgttgcgcagcacttcggtggtcatgaccacgatgtccgcctcggagttgatcgaggtgtcgccggtgagcaggcctaccttgtccgggccgtacacgtcgaccagatcatggtatttctgattgctcagcgctttgatcggtgtggtatagaaggctttgacgttgcgttcctgggcgagataaatggcaaaatccgccactacggttttgccggcaccggttggggccgcgaccagtacgttgctgccggcttcgagcgcgtcattggcttcggtctggaagtcgtccagttcgaagggcagggattcggcgaatcgcgctgctgcggacgcccgatggcgctggactttttggaatgatgcgtaccgctgcgaagggctcagcgtctgggaatcggcattgcccttatggtgttggtgacgtgccattgctgctttccgttagttgttgaatcgcttccagcgggcccatgcctgggtgtggcgttcgcgcttggcggccttgctgcgaatcacgtccgcatgggcctcggcataacgattctgtgccacgctgagcggctgagtgaacagaggcggctcgctggtgtcggcagaggtgccagactcccccatcgcggccacgcgttcaccgagctggccgccgatgtcggacatgtctttcaaggcacggattccatgaagggctgcatagatgagtccggcaacaatcatggccagcatgaacagggccagaatcagccatatccaccaaggcatgaaaggctccttacttgttctcgctgatgctcagttcgcgttcggcgcgtgccacgatcatggtgcgcaacgtttccggggcgaccgccgtgatatgacgcgcgtgggcaatacagaaggccacgaaccaggagtcggaggaaacggtcagatgcaccttttcaccggcaccgcattgttcgacggtagcgcccggcaatgtcttgatgaatgccagatcgcgctgatcggtgatgaacaccgcgtcggtaccgttgtcgaaactccacttgcgcagttcgctcaccggcatgttcgggatgttgatctgcttggtgggcttgaccagttccgccttttcgatacgggccaagcgcagcacctgccagatgcgcggcttgccgttcgccttgtcgatggtcttgtctttggagacgtaggccttcttgtccttaggggcggcggaaccgacatccgtgtagacggcggcataatacacgccttcgtcgatgaaaatcttggcgggggccaccagcttgcgacgggtactaccggtaccgtcggagtactccatgtccaacagcgaatcggtgttgatcgcgcgcttgacgatggagaagcttcggggctccagctcatagccggtcaggctcagccacggggtctggcccgggctgacatggcggcgcaaacgctcatacagggattcggcctgcccacgctgcttgtccggcagtaacggcgaatgcgccaagtagctgaccgaggcggtgagcatgctgaggtattgcggcgaaatgccggcaagacgttcaaggcccaacgaattggtggcggaaacaataccctcggcatccagcagcggccagtcgatatcgaagaactggctgccagccatctcaccatcgtcggaaacggtggtcagggtgttgatgtccttatgaatgatgttgacgaatttcttgagctcgtcgtcgttcttcggtttgccgataaagcgctcggccagctcgctcatcgagaattcctcacccaggtgagcggagaggaacagcatcagacgcaggcgacgatccacctcgctgcccgtttggaaagcggatccgttcttcttgttctgggccttgatcgactcgggatcacccggctcacgaacatcgcgactaatcgacggggaaaccaccgaggcgcttacagggctggcggattcgtcagccagagtgaatcggctggcggcgtgcaggcggcgatgataggcgtccacagcctcctgcgggctgacaatcgtggcacccggatgctccagcacaaacatggccaaatcgtcggaatcggtgtaggccacgttcaggtgttcgccgtccacatcaacggtggcggcaaagcgacgcgaatcgataaccttgaccagcgagtccggaatgggctgcgtgcccaagccaggcgcaatcgaatccaaaccgagaccgggaataggggtctgcggcacacgcggcgtggtgcgcgacgcatgttgggcgagctgggactgatccggctcggaggaaatcgacatcgaacgagccagatagttggcggcggcaagcaccggcatatcttccggctcgaacatcagacggatgcgcggttcgtcgcccaactgcagacggtaggacgcgaagtcctggccttccgacttggacgaatactcaggctgccgtgattcgatggcgatgcccatagcggcgagcttggcgcgatcacgctggaactgcttggcgaacgcggccttggcagcctgatctgccagctctccatacgagtcggcgtaagccttgacgcgctgcgcaatttggcgggatgtgagccattgcgggaacgcggatgacaacacagccagtacgtccagctcgtgcttgccccatttgtcggaaaaacgccgacgtccgcttgtgccctctgccattagtcctcacgtatagttattgtttcgttataagtgcgtatgagtttcctcacactcactctatcttagaggctttttccgcacttgagcgccatttcacaaaaataatatcttttttatcgttcgaccgtgttgtaaatcacacccaatcgtccggttcgatgccttgcggaccaacgtattcgccgttcggcacatagcttggctcgcccttatcttccagtttggcgtcggcgaacatcatgacgtcacgtccgaatgtccagtcgccctgaatggaaaccgagttggctgcggccaaagatggcacggcgtaggggaaccgttcgtcgaaatcgtggatgttcttgtagtatcgcggatcaagttcgacgttcgggaagatgtaattgccgtcttccatctcatacgtgtccgtcaggtggaatcgatcggaacgcataatgaacaaatcattggtggttttcaccggaaggaagcgcatacgatccacttggacgcagatagaaccgttgaacagaccgattgcggcgcccatggcggtttccagctgaatcacctgttcggaatccgggtccgtgggattcacggtctttttgttacgaatcaccggcaacggcaacacaccatcgcattcggcgagcttgtctttcaaagcgtcgatgcgaacccagatcgagttggtgttgaagtaaggatgcttggtgatgtcttgggccgcttccttatcgtccggatggacctggctcatttcacgcagtattaggcgaccagtagctttgtctcgcacaatatggccgcccttgcgatcggccttggtgcggatggccacttcagccataaacggggcacctgtgttttcgaagtgctgggccaacgtacgcgaggggcgcgcaccgagattgtcggaattggagatgaacagatacttgaagccgcgctcctccaatacgtcaagcagaccagactcccagatggtggagaacaggtcgccgtggccgggcgggcaccattccagctccgggttcgcagggtagctcacaggttcgccggtggcggccacgagcttgggttcctgatgctggatgatttccatcggcacgtcatgctgactgaacttgcgatgatgcttgagcaccttcatcgtgtccgccgaagtgtggaaggagttcatgaacgtcagcggcagttcgacgttcaggcgcgtgcgagcggtaagcacctgaccgatgatgatgtcgatgaagcgcatctgcttggccttgtgcctacgcaccggcaacagcgacttggccttgtctaatcccatggaggtgcccagaccgccattgagcttgaggaatgcggtcttggcgaaggcgtccacggccttgtcgtggttgatggtctcatagacgtcgtggaagctgggcacgtggccaagcggctcgatgtcgtcctcgcgaatccagctggaggcttcttcatggcgccatacgtcatacaaatggtggaactggttgatggcggtttcgctcatgccatgctcgcgcatcttggcggccgaaagctcgaaagtctcatccacttcgggggtgtttacggtttcttcgggggtgtccgaggtaacggcgtcggtgtcgtcagcggcggcgatatccagttgggccttatcgtttatttctgtcaattcgggtccctttcgtcaaatcaataggaaccagtctagcccctgtttggggcaaacgcatacgacgggggtgcggaggcggtgaattgtcggtgataattcattacgaatggcttacaaaggtaagtccgtcgtcatgttgtctcatgttgtctgaaaaacggaaaaaccccggaagacaaccactcaaaagtggcggaattccggggctaatcggtcgggccggcgggatttgaacccgcgaccccttgacccccagtcaagtgcgctaccaaactgcgctacggcccgatggtgcaaaagcaccaagtagataatttaccagatatttgaaatctggcaaattacgcgcgtgtcacttccgcttcttcttctcgcggatgttcacggagatctgaatcggcgtgccttcgaagccgaattcctcgcgcagggaacgctcgatgtagcggcggtagccgtgctcgaggaagccggtggcgaagatcacgaaacgcggcgggcgcgtggatgcctgcgtggcgaagaggattcgcggctgcttgccaccacgcaacgggtgcgggtgagcggcctgaattttgccgaggaaggcgttgagcttgcctgtaggaatacgctgatcccaagattccaaggccttatccatggctcgcgtcagacggttggtgtgccagccggtcttggcggacaggttcacacgctcggcccacatcacacggtcgaattcggtgttccacaggcgttcgagacgctgcttgtcgaactcgtccatcgcgtcccacttattgaacacgagcacaatcgcacggcccgcatccacggcggtggacatgaccttcaaatcctgatcggataccggctgcgaagcatcaaacaggatcagcgccaattcacagcgctcgatggcggcctgcgtgcgcagagaggaataatattccgcgcctgtgagcttgtgctggcggcgcttgatgccggccgtgtcgatgaacagccagtcctcgccatcgatgttgacgatttcgtcgacggggtcgcgcgtagtgccggccaaatcgttgaccacggcacgttcttcgcgcgccagctgattgagcagagacgacttgcccacgttcgggcggcccaccagagccacgcggcgcaggccggaaggcgtgaggtagccggaagtcttctcggcctgcttgagcttgtcgagcgcgacgtccagcaggtcgcccactcccctgccgtgcatggcggaaatcgagtatggttcgccgaggccgagcttccagaattcggcggcaagatattcgctggcctggtcgtcgatcttgttgacggccagcacgaccggcttgccggcggcacgcagcatcttgacgatgcgctcatcggtggtggtcatgcccacttgaccatcgacaacgaataccacagcatcggccaaggtcacggcaacctgtgcctgtgaggcgatggcggattcaatgccttccacgtcggcttcccagccgcccgtgtccaccagcttgaagtcagtgccggcccattccgcgtcatagctcacacggtctcgcgtaacgcccggcgtgtcttccacaacggcggcacggcggccgaggatacggttgaccagggatgatttgcccacgttcggacggcctacaacagccagcacacccaccggcttggggccggccttgcgcgcgccttccgtgaaaccgcggccggaaatcagatcctcatcgccttcgtccagctcatagccttcgagattggcggcatactgctcgtactcctggttctcgatggcgtcctcgaccagaccgatgagcagatcgagcgtgtgggcgaagtccaaatcggaattgtcgatggtagtaacgccatcggcggcggtcaggaagctggtgaccttggaatcggccttgtcgcgcgcagccacatcctcagcacccacgcccttgacggcttggccggtgcgacgggcctgacggacctcctcacgggcggtcagcagcacgcgcacctcggcgtccggggacaccacggtggtgatatcgcggccctcggccacgatgcccaaacccccggagaaggagtcggccgacgcttcgcgggcgatgtaggcgcgctgggcggcgatgagcacgttgcgcaccgggatgacgttcgacaccttggagacatggctggagacttcggaggaacgaatggcctcggagatgtcctcgtcgtcggcgaatacgcgggggttgtccgggtccacggagatatcgaaatggtcgccggtgaagaactcgcccaccgcttcggtgatgacacgctcatccacggtttcggcgtccagatcgatgccctgcttcagacaccaccaagcgcaggcacgatacatcgcgcccgtgtcaaggtaagcgtatccgaaatacttggccagcgccttggacgtggacgacttgcccacgccggcggggccgtcgatggcaacgcgaatcacagaccaacctccttggacagcgaacggacttccgtctgggacagcacgcggtaggaaccgggcttcaaatcaccgagcttgatcgggccgatctgggtgcgcaccaagcgcttgaccgggaagccgattgagccgaagatacgtcgcacgatgcggttcttgccggagtgcagcacgaccttgaccatcgtgtggtcacgcgaggagtcgatgatcgcgcagtggtcgagcttgatccagccgtcgtcgagctgcacgccggtggtcacgagtcgacggcacacggtgccggagatcttgccttccagcgtggcgacgtaggtcttctcgacctcgtacttggggtgcatgacgtgctgcgagagctcgccgtcgttcgtcatgaggatcagaccctcggaatcgtagtcgagacggcccatgtggaagatgcgctcgtacttgtcgcccacgatgtcgcgcaacgtgtagcggcctttcgggtcgtccatggcggagagcaccttgcggggcttgttcagcgccagagtgacgtggttcggattgacgcgtacgcgcgaaccgtctacgcgcacctgctgcttatgagggtcaacgcgagttccgagctcggtgaccagttcaccgtcgacctcgacacggccttcggtgatcatgtcctcgcacttgcggcgggacccgaatcccgcttgggcaagcagcttctggagtcgaatggaattggaatcgtcttgcgctttcgcagcgcgggaatatgcgtttggcatcgttctcccaacgtggccggacagattctgtcatcgcagagactgtcgatttgtatacatacttcagagttggcggactggaatcccagccaattccgacctatatatcataccgcaacgtaggactgctgctagactggcaaccgtttgtgcgggttcgcccgtcttccaacagatgaaaaggaatgaacaatcatggaagaaaccaagcaacagccgctggctctgcgcgtgtgcgccgaattggccggcagcttcctgctgtgctttgccatttacgccttctccacatggggttcggccgtgtatggcatcaatatcgtgttcttcgcgttggctaccggcttggcatatgccgcagtcaccgccatcttctcccgcgtgtccggtggccagctgaatccggccatcaccgtagcctccgtgctggtttccaagacgaaaatcctggatggcatcctctatgtgatcgctcaggtcatcggtgccatcgccgccggcttcgccgtggtcaagctgctgcccacatccgagcaggtagctgccaaagtgtggctgactccggccgttaacggtttcgaaaacggctccgtgtcttactcgctgctgacccagtatggcattacgttctcgattacgctggcgattgtcgtcgaggtcgttgcctctctgattgtcgttgccaccgccatgtcttctctgggtgatcacggcgagtcctcggaacgtcatgtcattgccatgggtcttgcctatggtctggccaccgccatcagctacccggttaccggtgctggtctcaatcccgcccgttccaccggtatcgcactggccgcgatgaatgagggtcttacgcaaaatccgctgcagcagctgtgggtattctggattagcccggtcttggccgccgctgtggtggcgttggtcatgatcatcgcgcagatgatgaccactcccaaagtgccggctgccgccgatcttccgcagacggatgccgatgcaaacgcggacacgctcgacgatggcgaattcttcgatcaggccgcctcgtctgatggcgattcagcggaaaaagatgttgccgaagagtccaaagaagctgaagtaggtaatcagcaggccgattcccaaggtgatgccgatgaaggagtcgaacgccactgagcgcactttccatgggcttttgtcctgaagaatcaggcgaacaagcccggtgatgatggccgtcacggcaagtatgaccgtggcggccatcgtatatccgaaagcaaccagcagtgtgatgacggcgacgacgccgagtacgcaccattcaaaccatggcttgccctcatgtgcttcggatacatagggatggttgtgcatgttgcgattccttctgtcgaacggttacgtgaccacaatagcaggcgaatagcaaaggtgggattccgcttggacccgtcaacgggtcaagcggaatcccacctttgtgcgttttggctgagcttctcccctcagagagtcccgatcagtggaagaagtggcgggtgccggtgaggtacatggtcacgccggccttcttggccgcttcgatgacctcctcatcgcggatggagccgccaggctgcacgatggccttgacgcccgcgtcgataagcacctgggcaccatcggcgaacgggaagaacgcatcggatgccgcgaccgcaccggtggcgcgatcggcaccatcggccagcgtattggcgcgctcgacggccaaatggcaggagtccacgcggttgacttggcccatgccgatgccaaccgtggcctggtcgtgggccagcaggatggcgttggacttcacgcagcggattgcacgccatgcgaacacgaggtccttcagcgtgtcagcgtcggcggcctcgccggccacgagcttccaggcgtccggatcgtcgccgacggcgttgatcagatcagtgtcctgcacaagcaggccgccatcgatctggcggatggcctcgtggcccttcggcggctcggccaccttgaggatgcgcaggttcttcttcttggtctgcagcagttcgagcgcggccggctcatagtcgggggcgacgatgacttcggtgaaaatcgggcgcacgctttcggccatctcaagagtgaccttggagttgcaggcgatcacaccgccgtaggcgctcatcgggtcgcaggcgtgagccttcttgtgggcctcggccgcggtcgcgccgatggccagaccgcacggattgttgtgcttgactacggccacggcaatggcgggagccatatcccatacggtgcgccaggcggcgtccgcatccacgtagttgttgtagctcatcggcttgccgccgagctgctcggcgtgggcgaaaccggtctggttgagcgggtcgatgtagagggcggcctgctggtgggagttctcgccgtagcgcagggtgtgcgcacgatcccaggtgcgggtgaactgggccgggaacttggcggaatcgacttcagtgccctgatcgtccttgtccacctcgacggcgtccagagaggccggcttgggccagtgcttggcggtccactcgttgatggtggcgtcataggcggcggtgtgcgcgaaggccttggcggcaagccacttgcgctcgtccaaggagaagccggtgccgtcggccacgcgggaggcgaccagtgcataatcggccggatcggtgacgatggccacggtggcgtggttcttggccgcgccgcgcaccatggagggaccgccgatgtcgatcttctcgatggtatcggcctcgttggcgccggagcgcacggtgtcggcgaacgggtacaggttgacgaccaccaggtcgaacggcttgatgccgaactcctcgagctgcttggcgtgctcggggttggtcatatcagccagaatgccggcgtgaatgtacgggtgcagcgtcttgacgcggccgtcgaggcattcggggaatccggtgacatcggacacctcggttaccttgacgcccagttcggcaagcttcttggcggtcgaaccagtggaaacaacttcggtgccggccttcacgaacgcttccgcgagtacttcgatgccttccttatgaaagaccgagaccagtgctcgacgtatcggtcggttcgtgtttgtcatcctgttcctccttggattcttgtggttgtgacgctaggaaccgcgcctgacgaacggtggcggtcttcgaggtcgcggcggtggtgcgggaatccttgattctctcaaccaaccagactatcggaaaaacgagcgctgtgccaatcagcgcgagcagccacgccgcggtgagtcccagtgcggtcgaatgaccgacgactctggtggaggccatgacgtcgacgcctatgtgagcaagacgatgatcgccaagcgatccattggacagagcgaacagcaatgtggatgccagtgagatcagcatcgcgctcaggcagaatgccccggcggagtagatcagcgaaaccagtactgggccgcgggtggacgtattccgtatattcaacggtctgcaggcgaatccttgcggtaggaatacagccagcaggcccacgagcgcagcgatggcgagaggcgcgttcaaggcaacggtacgccatagttcgctgctgaccggttcgggcagaataccgaataccggaattgcaggaagctctttggattggccgagccataacgtgaaactggccaaatcaccgatggcgaatccgccgccgaagagccaggaaacagcccagagcatgacgttgggtagccagatcagcatggcgacggtggtgagaattcgtgaaccggtttccatcccggacaattcgaacaacgatacgacagcggcatggttgcgtaccgaccatacgatgacggtaatcaatccaattgccagatatatgctcagtatcgcgacggccaaggcgacgccgattttcaggcagtggcgtatgtccgccggcacctgcttgcgagtccagtccctgaatgctcgcattttggctgattccggtacggctgcgcataggaaaccgatcgagaatacgacggctgctttcagcaacaccagccactggtcatcgacaagacctaggtgcacggattgccggaatgcctcgttcaacccgagccaaacaatcaatccggcaacatacgcatgcggcccgtatgccttgattcgcatgatgagtgcattgatcagccatatcagcagtatggtcaacagcaatggcgtaatggtgagggtgaacgaatcggttctaaagcccgatccctcactcagaagcacaacggcctgtgtcagcgaggttgtgccgacggtgagattgtcgccgccctcttccatagagacgaccaataacatcagcgctgtatagcagcctaatgcaacggcatagatggccatggatgcgagggcgactatggctccccgcacccattggcgaatcacggctttcatcacgattggttggaaccgatcagtcgatgttggccttggcgagtacgtcacgcatgatctcggcggcctggcccggggtcttgcccacggggatgcccgccgcctcgagcgcgtttttcttgtcctgggcggtgcccttgcctccggagacgatggcgccggcgtggcccatctgcttgccttcgggggcggtgaaaccggcgatgtaggcgacaaccggcttggtcatgtgctccttggcccatgcggcggcgtcctgttcggcgaagccgccgatttcgccgatcatcatgacagccttggtgtcggggtcggcttcgaatgcctgcagggcttccagcagcgtcgtgccgacgatcgggtcgccgccggcgccgagacatgcggtgaagccgatatcggacaattcgcccatgagctggtaggtgagggtgccggatttggagaccagtccgagcgggccgcggccgacgatgccgtcggggatgatgcccagattgacgccggggttgccgagcgtgatgagaccagggcagttcggtccgatgatgcgcacgcccttcttgagcgccagttcgacgaagtatgcggaatcggccaccggaatgccttcagtgatgaccacgatgagttcgatgccggcttcgacggcttcgaccacggcggacttggcgaacttcggcggcacgaacaccacgctggccttggcaccggtggcttcacgtgcttcgccgcaggtggcgaacacggggatgttcgcgtcggcaccgttcttggcaccggggaaggtgacggatgtgccggccttgcgcgggttcacgccgccgacgatattggtgccggccttgagcatgcgagccgtatgggtcatgccctgatggccggtcatgccctggacgataacgggagcgccgtcttcgatgaacagcatcagcgaacctccttggactgggtcgcctcaccggcgagctgcgcggccttggctgccgcgccttccatggtctcggacacatggatattcgggttattggcggaggcgaggatatgcagaccctcggcggcggcgttgccatcgaagcgcacaacgatcggcttggaaccgccgagcttggcgaccgcttcgaggatgccgttggcgacttccacgcaggaggtgatgccgccatagacattgatgaacacggattcgacctgagggtcggacagtacgatctccaggctttcggccatgacggctgcggaggcgccgccgccgatgtccaggaagttggcgggcttgatgttggtgccctgttcctcgccagcgccggagacggcatccagggaactcatgacgagtcctgcgccgttgccgatcacaccgacctcgccgtgcaggtgcacgtagtgcaggccgtgttcgcgggcacgctgctcgaagggatcgggaacgatgggatccacgaaacgcgcccagccgtcatggcggaaggaggcgttgtcatccaaggagatcttggcgtccaaggcgctcagctgcttggtggattcgtcatccgggtcgccgatcttggcgagcggattgatttccacgagcgtggcgtcgttgtctttgaagcagcgccacatcttgagcagaatctgtgcggcctgatcgacgtccgcgtggtagaagccgatgctctgtgccatttcggtggcagcggccaggtcgaaatcgccgagcgcatcgatgtgcaggcgcttgacggcctccggatgttccttggcgatttcctcgacttcggtgccgccgttggcggtggccagcacgtcgaagtcgcgcgaggtgcggtccacggagatggacacgtagtattcgtgcaggatgttcttggcttcggccacaagcacgccggaaaccttgtgcccgtggatggtcatcggcaggatggactcggattcaagaatcgcctcgtcgcggttatgggcgatcttgacgccgccggcctgaccacgatgaccgatcttgacctgcgccttgatcacgcagggatagccgattttgtccgccgcttcggcgacttcatgggagttctgggcaaagatggcgtccggggtgggaatgttctgttcctcgagcagctgacgcgcctggtattcgtaaagatccatcgatccttccctgactatgtaattggtccggcatgtaactgtacatagtacatgccggaccttgaaaactgactgtacgttgggtgagacgaaatctcaggccggcatcgcgatcagcgagctgctgggcttgccgccgagcttatccagaccgtcgaggccatcgagccgcatcacgaaactgaagcccgccacggtgccaccggccttttcgataaggtcggtggcggctttggcggtgccgcccgtggcgatgaggtcatcgacgatgagcactcgctcccctgcctgtacggcgtcggtttcgatttcgacactggccgtgccgtattcgaggtcataggattcaccgatggtttcaggcggcaacttgccggccttacgcacggcgatgaaacccttgcccagatgggcggccatggccgggccgaacaggaacccgcgcgattcgagaccggcaatggagtcgaattcgctcggggacaccggcagagcctcttcaagtgctttgagcagaatcttcaagcccttggggtcggcgagcactggcatgaaatcacgaaagatgatgccttccttgggaaaccccggtacggaacgcaccaaggacaccagatattcggcgtcctgttgccctaccttgctcaatgcgtcgatggtgatgtccgactgtgccatagtgctcgccccttttatgcctttgcgatgcgatacgcggatggtgctaccggatcgaacagcttacttcgtcttggtttcgttgtcgtcaccggtctcgtcagcggtgtcttcctcggacactacggacgcctcgatcggaacctgaccagcctcatcgttagccggagcctcggtgtcttcgtcgggcagcgggttgccgttctcgtcgacctcatcatcggacacataggccgggcgggtgtactcacgggcgatggcgttgaagccgaaacgcagcttggagccttcggagtcgatgacgatctcctcatactgctcgtcgacttcgacgaccttgccgatcacctggccgatggtgatgacctcggtgccgggctgcaggttgcgacggaagtcctgcttctcctgctgttgctgcttggccttcttggactgccaccacatcatgccgccgaacacgacgacgatcacgatgagcataatgtactgttgttccacgaaacaactccttcaaacgagcgacattgacgaaacgccgccaagtgtgcaaacaggagaaagtctagaagagcttgctgacatcatctttgggcgtaattcccaaatgctgccatgccttctcggtagccacgcggcctttgggcgtgcgaatcataaaaccttcgcgcacgagatacggctcgcacacggtttccacggtttccgattcctcgcccaccatggccgccagattgttcaggcccacgggtccaccgttgaagttgcgcacgatggcattgagcacggcgatgtccagccggtcgaggccttcggagtcgatctggtacagggccagcgcctccttgacgtcgtccggccgcaccacgatcaggtcgtggacgatggcccagtcgcgtacacgacgtagcaatcggttggcgatacgcggcgtgccgcgcgaacgcaacgcaagctcatgagcggaacccgcatcaaggtttacgcccagtacgttggccgaacgttcgatgagcttttccaactcctcatgcggatagaagtcgagatgtgcggtgaagccaaagcgtgcgcgcaacgggcttggcagcataccttcgcgcgtggtggcaccgatgacggtgaatcgcggcagggtcagcgggatggagcttgcgcccgggcctttgccgaccatcacatcgacgcggaagtcctccatcgcgatatacagcagctcttcggcggcgcgcggcagacgatggatctcgtcgatgaacagcacttcgccgacgtcgagggagctcagaatcgaagcaagatcaccggcatgttgaaccgcagggccggaagtcacgcgaatcggcacttcaagctcattggcaacgatcatggccaacgtggttttgcccaagccaggagggccggcaagcagaatatggtccggtggcacatcgcgtttgcgggccgcgtccaggaacagttgcagctgggccttgagccgcggctgtccgataaagccttcgagaacatgggggcgcagctcctcgtcgctgaccggctcgttgccgatcggctgggaggagaccatgcgcaacgactcttcgttggcaccggtgtttgaggtaccgtaatccgttgtctcgctcatcagcggcccctatccatcagcgccaaagccagacgtagcacacgcggcacatcgtcggtggcaagcggcgtgggaatatcgttttcggcgcaagcctcggcaatggcctgctgggcgtcctgctgacgccagccaagtgaaatcagtccttcgacaacctgttccgtaccggtatccaccggagacttggatattgccgcctgagcggaagcaccctcgatctgactcaaatcaatagagcccttaagctcgaggatgattttctgtgcgcccttcttgcccagccccggagccttggccagcgcggtggcgtcgttgtcggcgatggcgtgggccagctgactcggcgtcagtgtggagagtaacgattgggccactttaggtccaatgccggagaccttgatgagttgcagaaaggttttcttggcgtcccgatccaggaatccatgcagggtaatggcatcctgagagaggttcatataggtgaagacgcgggtgtcttgcccggcgtgcagacggctcaggtcggtggcggacatgcgcacttcgtagcccactcccccaacatcaatcaatgcggtatcggtctcgaccgattcaacccgcccggtcagcatgccgatcatacaggtactccttcagggctccaggattcaagactcgaacaactgttcgaaagtatactacatgcctcggtcgtggttgatgcggcggcgcgtggatttctgtgcggcctcagcccactggcgttgcgcggcggtcagatgttgttcgcgttcgccgccctgcaatgcgcctgccgggcgcagcgcatggcaaatggccaaagccaaggcatcggcggcatcggcgggagtcggcattttggtgaggttcaaaatacgtgtcaccatacgctccacctgaatcttctgcgcctgcccgttaccggtgatagccagcttggcttcggtaggcgtatgcaacgccacgggaatattgcgttgcgcggcggcgagcatggcgaggccggcggcctgtgcggtaccgagtacggtgttgcggttggattgtgcgaacactcgttcgatggatacggcatcgggtgcgaagcgatccattttctcggacaggccgttgtagatggccagtagacgcagatcctgggtgatatccggtgaggaccgcaccacgtccacgtgaataaacgaaagccggcggtgctcgccggcttcgatcacgccgaccccgcaacgtgtgagcccggggtcgacgccaaggataatcacgaggattactcctcgtcgagctgggccatcacctcgtcggaagcggtccagttggagtagatgttctgcacatcgtcgaggtcatcgaggttgtcgatgagcttggacaccttgcgggcatcctcaaggctcaactcgacctcgttcttcggctgcatgacctggtcggcggaatcgtagtcgaagccggcttcctgcagagccttgcgcacggtgaacaggtcggacggaccggtcacaacggtgaacacttcaccgtcatcggtaacgtcctcggcaccggcttcggcggcggtttcgaacagcttgtcgaagtccacgccctcggacggcaccacaatctggcccttgcgctcgaagttgaaggacacggagccggaggtggccagagagccgttgcccttggtcagggtggaacggacttcggcggccgcacggttgcggttgtcggtaaggcattcgatgatgaggccaacgccggcaggagcgtagccctcgtagacgatgtcttcgtagttggcggcgccgtcttcagcaccggcaccacgcttgacggcacgagcgatgttgtcggccggcatggaggccttcttggccttgtagatggcatcgtacagggacgggttgccgtccgggtcgccaccgccgaggcgggcggcgatttcgatgttcttgatgagcttggcgaagagcttgccgcgcttggcgtcgatggcggccttcttgtgcttggtggtcgcccacttggaatgacctgacataatgctcctagcaattattgaaacggatgatgtcaaacgaaacaattgtaggccgttaatcagacatacccgtgatgtttccgatgattgtcttgttatgcgtaccgataagaccggtcacgcggggtgccgcacctgtgttaggcaagcggcagatgatactgcggagccagctgttcgaatgcctgggcataggcttctcgctggtcggacagcagaataggcatggtgcgtgtctgggcgacgatgggcatgaagttcgcgtcaccattccagcgaggcactacatgctgatggaggtgagcggcgactcctgcgcctgctacttcgccctgattaatgccgatattgtaaccgtgcggacgggagacggtttccatcaccttcatggcgagggtggtggccttctcgaattcgaacagttcggcatcgtcgagttcggtgatgaatccgacgtgacggtacgggcagatcatgagatgcccgacattgtatgggtagaggttcatgatggcgaacacgtgcgtgccacgccaggcgatgaggccgtcttcgtcggatttcttgggtccggcgcagaacgggcattccttcgtcttgggcttggttgggcgatcctcgctgttgcgcagcacataggtcatgcgctgcggagtccacagtcgttcgaccgtgtcctcctgaggcggaaagtccgccggattatcgacacgcacgtcagtcattttcgcaccctttcttggctcccctcagagaggggagccagtaccattcacatcactcagccacagcggcgttgaagtcgtcggcggagttcacctggacgcgcttcttgatgacggtgaggatctgctcgcgggccttgtccaccggaacgccgttgagctggctgccgtcacggaagcggaagctgaccgcgttgttgttcatgtcttcctcaccgacgatgaggatgaacggcaccttggacttggaggcgttgcgaatcttcttgccgaagcgatcgtcggagtagtcgatctcgcaacggaccatctcgtcctcaagggacttgacgaaaccggccagatgcggggcgaactcgtcggcaaccggcacgccgagcacctgcacgggggccagccacgccgggaaggcgcctgcgtagtgctcgagcagcacggcgaagaagcgttcgatggagccgaacagggcgcggtgaatcatcaccggacgctggtgggtaccgtccttcgcgatgtactcgagctggaaacgctcgggcaggttgaagtcgagctggatggtcgagacctgccaggtgcggccgatggcgtcgcgggcctgcacggagatcttcgggccgtagaaggcggcgccgcacggatcgtcgacgagctcgaggttggattccttggcgacctcggcgagcgtgttggtggcctcctcccagatctcgtcggagccgacgtacttgttcgggtccttggtggacagctcgaggtagaagtcggtcaggccaaagtccttgagcaggttcagcacgaaggtcagcaggctggtgagctcgtctttcatctgctcgcgggtgcagtagatgtgggagtcgtcctgggtgaggccgcgcacgcgggtcaggccgtggacctcgccggacttctcgtagcggtacacggtgccgaactcgaagaggcgcagcggcagctcgcggtaggagcgctgacgggacttgaagatcaggttgtgcatcgggcagttcatcggcttcaggtagtagtcggcgcccggcttggtgatgttgccgtccgcgtccttctcctcgtcgaggtgcatgggcgggtacatgccgtccttgtaccagtgcaggtggccggaggtctcgtacaggccgcccttggtgatgtgcggggtctgcacgaagctgtagtggtgcttgcggtgcatctcacgggagtagtcctccatcgcgttgatcacggcggcgcccttcgggtggaacacggccaggccggggccaatttcatccgggaaggagaacaggtccatctcggcgccgagcttgcggtgatcgcgcttggcggcctcctcgagacgggtctggtaggccttgaggtcttccttggtggcccacgcggtgccgtagatgcgctgcatggtcgggttcttctcggaaccacgccagtaggcggcggcggaacgctcgatcttgaaggccttgatgtagcgggtgttcggcaggtgcggaccgcggcacaggtccttccaaaccacattgccatcacggtctacgttgtcgtagaagctgagctccttttcggagatctcggtggcggcggccgggtcgaggtgtgcttccttgtcttcgatcagttcgatcttaaagggctggtcggcctcttccttcagagcctcttcctcagtcacggaacggcggcggaaggactgggaggacttgatgatgcgctgcatgcgcttctcgatgtccttgaggtcgttcggggtgaagggctggtcgacctggaagtcgtagtagaagccgtccttgatgacggggccgacgccgagcttggcgttcgggtagacttcctgcacggcctgggccatgacgtgggtggccgagtgacgcatgattgcgaggccgtcttcggagtcgagggcgatggggtcgacggtatcgccatcgttcagcggcgtgtacaggtcacggttctcgccgttgatcttgaccgcgatgatgttcttgtcttccgcgaacagttctacgccggtggtggttgcttccacctccttcgcttcgccgttgacggttatggagatggtagcttgcgccatgatttgtcctttgctatcggggcccacggtactaatgtgcaggcctggactggttaatcaacgtaggacacgataggttgggcgtgcgacaaataccaccagcatctgaaccaatacgaaaaaacctcgccgaagcgaggtttcgttgtggagcggacaacgggactcgaacccgcggtctcaaccttggcaaggttgcgctttaccaactaagctatgtccgcaaaggattccgccgtgagaagcggaatccagtgggcgatgtaggaatcgaacctacgaccccttcggtgtgaacgaagtgcgctagccgctgcgccaatcgcccgaatattcggttcttcagttatatccagtcgaattgtttcgactttcgtgggcgatacaagattcgaacttgtgaccccttccgtgtcagggaagtgcgctaccactgcgccaaccgcccgggtcatatttcattccattgaattgcttcgctggtctgagaggtgggtacgagagtcgaactcgtctatacggctttgcaggccgctgcctaaccgcttggctaacccaccgtaaggtctgtcaactcacggacctagagcggacaacgggactcgaacccgcggtctcaaccttggcaaggttgcgctttaccaactaagctatgtccgcgtgtgtttccttggcgaggtctccctgccgaagcacgagtgtttactatacacacatgcgtgtagttcgtccagctgcggcgtgtcgcctgtaattgcatactctcgcttatggctaaagcgtgcgcttcgggcaatgaactccagttactctagaggtatgagtgaagcagcgaaggacaccggcgcagtattgatcgccgcattcgagggatggaatgatgcctgtcaggcggcgacgaacgtggtgcgccatctggtcaaacgatatgattcccgcgagattcgtcatattagatgtgatgatttctatgactatcaggttgcccgtcctatgctgtgccatgtttcgggtcgcatcaatcttatctggccacagaccacgttctacgacatcacgttggacgcaggcaagcgtatctatgcgcagattgcccctgaaccgaactatcggtggaaggaatactgtagccagagtctggccattgccgatgagctggatgtcaatcggatcattacgttaggttcgatgttctccgattgcccgcatacccgtccgttgcccatcgccgtcagcgacggagactgtcaatgtgaaggagaccggtcgtataacggcccggtgggcattcctactgttctggatgcagctgccgcacaacaaggatttgctcattcctcgatgtgggtgtccatcccccaatacttgggcagcgacgaatgctctgccggcactatacgattgcgggatgcgttgggcaagtatatcggcttcatcttcgatacggcagacctgaagcagaaagccgagcagtggaaggcgcaggcctcgatactggttcgttgcaatgaccagcttcatgattatgtggagcatttggagcacgactacgacttgcagcagaaagccgaggcggaggcttcattgggagcgccccaggctgaacaactggtcaaagaagcggaagcgtttctacgccagatgggcaattagccctatatacacaatactcccgctgacgggagctggctcgcgtagcgagactgagggtggttctgctggcatattccagtgaccaccctcagtcagcttcgctgacagctcccgccggcgggagcaccattatattgagtcgcctatcgacccgtcttatgccgcagccaccacggagggatcgatggccggcagcacgcccacaatcagcagcaaggcgacgaccacagccaaaccgatgcggtagatggcgaaggccttataggagaagttcgatacgaacttcaggaatccgatgatcacgatgtagccgagtacgaagctgatgaccatggctacgagggtcggcccccagccggggaacatcgcatcggttttgtagttcttcacggccttgatggcttcgagcaaacctgagccgaacaccgcggggatggccatcaggaagctcagacgcacagcggcctcacgcgtgtagcccagtgcgcgaccgacggtgatggtgccgccggagcgggacacaccaggaatcagcgccatggactggcccaaaccgaagaggaatgcatcacgatacgtcatatcattcatggttttgttctgacgagccttggcatccaccatccacagcagaatgccgaataccaacagcacggttaccgtaatccacaggttgcgcaacgaggtttcgatgacgttctgcagagtgaagccgaggataataatcggaatcgagccgacgataatgttccagccgagtgtggcgtaattgtcgccgcggcccatgcgggccttccaatccttgccgttcttgccgaacaggcagctgaaccagtgagtaagaatattgatgatgtcgtgacggaaatacagaatcaccgcaagttcggtgccgatttggatgatggcggtaaacgccgcaccgggatcagagcccagcatcaaatcgccgaaaatacggatatgcgcgctggaggataccgggagatactcggtcagcgcctgaacgatgccgagaatgatcgcttggaaaaaattcataacccctcgtgatttctaagtatttgatgtgttatgacgatgaacaccctacccaagggggtgtagaacaacactaagaatcggtaacatccacggcttctacaatgaaagtggatatagtacgtaagcgacgaagggagcattatggccacgtatcgcaaaagcagggcattcgcaccggaaggattcttcgaatgcgagggtcgaggactcgaatggttgggagcggctcatgcgcagggcggcccgcgcgtggtgcaggtatacggctggggcaaggattatctggatatcgaacgtgtgggtagcgcgtcccccacgcctcaggcggcacgagcttttggcgcggctctggcccgtatgcatgatgcgggtgccaagtatttcgggtctgcgcctgacggatataacggcacatgctatttcggaccattgcaggacccggtgaaaatggataccggcgagtggaccgacccgatcagctatttcgctgatggacgtctgcgcccgatggtcaaccttggtgtgagacgtggcgagctggataagcgcgatgtcgagttgactgagcgtgtgattgaagcgctgccggatctgatgggccgcgccgcggccgacaagccggcgcgcatccacggtgatctgtggagcggcaatgtgatgtggaccgccgattccgggcagtccgaggccgtgctcatcgacccggcggcacatggcggtcatcgcgaggaggatctggctatgctgcacctgttcggtatgagctatctgagcgaaatcaccgagggttaccagtccgtacatccattgaaggccggatggcaggagcgcatcacgctctggcagctctaccccatcgccggccactgcgtcttcttcggcggcggctacgtcaacgaataccgctccatgtgccgctccctgctgaagtaacagacttggctcccctcagagggggagccaagaacgcatccgctctcagctcagtgcgtccttcaacttgctgaagaaacctttcttttgaccggcctgtggacgggatgcctgggagacgtgcgtggcgcctgaatcgtgcgaggcggcgaactgttcgatgaggccacgctcggtttcgttgagcttggtggggataagcacattgacgtgggcgatgaggttgccgcgctcgtccttgttgcggatgttcgtgacgcccagtcccttaagcgtcaccgtgtcctcagtctggcagccggccgggatggacacggtcttctcaccatcgaacgtatcaatggacagatcgtggccaagcacggcccagctcatcggcacctgaatccagcagtgcaggtcgtcgccatcgcgggtgaactgcttatccgccttgatgcggatgtcgatgtacaggtcgccggcagcgccgccgccctcacccacttcgccttggttggccaaccgcagacgcgcgttgtcgttgatgccggcgggcacggtaacgcccacggtacgcgtggtgcgcacacggccgtggcccatgcagctggggcacgggttctggatgatggtaccgtggccctcgcaacgttcacagggggcggaggtcatcatctggccgagcatggtgcgcacgaccttctgcatgaatccctgtccgtggcagtcggggcaggtgaccggctgtgcgccgccctgggcaccggagccaccgcactcctggcacagggagaacgtattgatcttgacatgcgcggtgccgccgaacaccgccgtcttcaaatcgatggacgccgaggccaaggcatcgcggccgggctgggtacgcggcaccgggccctgtgagccaccgccgaacgcggaaccgaagaacgtggagaacacgtcgctcatatcgccgaagcccgccccggagaagccgccggcaccggcgttcgggttgttcgggtcgactcccgaatcatacatacggcgtttgtccggattggacagcacatcgtaggcgttgttcacttccttgaacttgtcctcgaactcagggcccgcgatgtcggggtggtacttacggctgagcttgcggtatgccttcttgatctcgtcgtcactggcgccgcgttccacacccagcgtctcgtaataatctgccacttgattgatcctttgtgttcgtttggtctgcgggtcattgtgccacagacggcggtcagtcttgagtccggccctcggagaggaaggcggtcaaatatctggctacggccctgacggcggccatagtggccgcatagtccatgtgggtcggccctatggagccgacgaaggcgatgggttccgtgtcgttcgtctggatctccgtctcggattcggtttcgggttcgcctacgggatcgttccccgccggttcgcccgccgctccgctgcgcccatagccactgctgaccacggaggcatgcagtagtccgggggtgtgcatttcggagccgatggccacgcccacgccggatgcattcgtctcctcgctcaggttgctcatgagcttcatcagcacgacctgttcttccagcgcgtcgaagagcggggccagatcggccagggaccgggagtgggccaggtgcgaggtgccggacatgtacagttcgttcgcgcgttcgtccaatgccatcgattcgaaggcgtcggccagcgcgtcggccacgccgcgcaccgactcgtagccggcgctggcggcgatggatcgcacggtctccgcggatttcgatagggacagcccgtcgcattgttcgttgacggtgttggagagccggttggtctcgtccacggcgggcatggatgcgatggtcaggccgtgctgggccacgcggccggtatcggtaatcaccacggcgagcaacgtggtcatggcaacgggcaccatctccacgtgccgcaatgtggccttggccagcgatggcgaggcgactacagccacttgaccggtgatttcggacaacagtcgtgccgaacgttgcagcgcgtccttgagactcaccgatccggacaggaagctgttgatgccgcggcgttgcgcctcgctgagcggcaccacggtagcaagtcggtccacaaagtatcgatagcccttttcggtgggcacgcgaccggccgaagtgtgcggctgaatcagatagccttcgtcctccagagcggccatgtcgttacggatggtggccgaactgacgccgagatcatggtcgcgcgtcagcgaagtggagcccacgggctcctgagaacggatgtaatcctccaccacggcgcgcagcaccagcatacgtcttgattgcgtcatgcgcgcctccttatatatacatacatattcatatcagtcacggttcactcagggcgtaccccgacggtcggttcgccacgccgcgacacgcgggaacccagaaatattgcctctttcttggctctgccacgtgcaggtggcgcacttcaccttagaacattgtattagcactccttaggcttgagtgctaatgcgttcgtttgcagcgtagcaatgttcactgtgaacgctaacagaacacaaactaccaaaacacgccaaaattgctccataacgtcgcaaaccgacgctagcatggtaatcgcaatgtgagggcgtcaagcgcccggcacaagccggatacgcggcccgaccaattggaaggaaagtaatccatgaccgaattcaaggagaccgagctcgacgagcgcgccatcaagatggcgaaggtcctttcggctgacgcggttgagaaggcaggctccggccaccccggctcccccgtctccctggcgcccgtcgcctacacgctgtaccagcacttcatcaagcacgatccgaatgatcccaactgggaaggccgcgatcgcttcatcctttccggtggccacgcctccctcacccagtacgtccagctgtacttctccggctacggcgtgaccctggacgaccttaagaacttccgtggcggcgctgccacccgcaccccgggccacccggagtacggcctgaccccaggcatcgaaatgaccaccggccctctgggccagggcttcgcctccgccatcggctttgcctacggcgagcgtttccagcgcggtctgcttgacccggagaccccgaaggaagattccccgttctaccacaagatctgggccatctgcggtgaaggcgacatcgaggagggcatctccggcgaggccgcttccctggccgccaaccagaagctcggcaacctgaccgtgatcttcgacgccaaccgcatccagatcgaaggcgacaccaacctggtgctggccgaggacgtgctcaagcgcttccaggcctacggctggtacaccgacgagttcagcttcatccagcccgacggctcctacaaggaggacatcgagggtctggctgacgtcatcgccaaggccgagaaggccgctccggaccagccgaagctcatcaaggttcactccctgattgcttggccgaccccgggcaagaccaacgacccgtcctcccacggttccaagctgggtgccgaggctgttgccggcctcaaggaaatcctcggctacgatccggaagagaacttccacgttgacgaagaggctctggctcacgctcgcaaggttgccgagcgcggtctcgaagcccacaaggaatgggacgagaagttcgacgcttggcgcaaggccaacccggacaaggctgccctgtacgaccgtctgaaggccggcgaactgccggaaggcttcgacaaggcccttgacgaccttgaggccaccttcgaagtcggcaagggtgtcgccactcgtggcgcctccggctccgtgctcaacgccatcgccgctgtcatgccggaactctggggcggctccgccgacctcggtggctccaacaagaccgatctcaagggcgctgccaccttcgccccggccgagtgcgccaccaagcagtggccgaactgcaacgagttcggtcgccagctgcacttcggcgtgcgcgagttcaccatgggctgcatcaccaacggcatcctgctgggctcccacacccgtccgttcggcggcaccttcttcatgttctccgactacgagcgttccgccgttcgtctggccgccctcatggagattccgaacctgtacatctggtcccacgactccgtcgccgtcggcgaggatggcccgacccaccagccggttgagcaccttgcttccttccgcgcgattcctcagcttgaggtcattcgcccggccgacgccttcgagaccgccgaggcttaccgttacttcttcgagaagaagaataccctgcctggtgccatggttctgacccgtcagggtgtcccggttcttgccgagaccgccgccaaggccaaggacggtgtcaagaagggcgcttacgttctggtcgacaccgagggcactccggacgtcatcctcatggcttccggttccgaggtccagtgggctgtggctgccgccaagaccctggccggcgagggcgtcaaggctcgcgtcgtgtccgtgccgtccatggaatggttcgaggagcaggacgccgagtacaaggaggccgtgcttccggccgctgtcaaggctcgtgtctccgtcgaggccggcgttgccatgccgtggtacaagtacctcggctcctacggcaagcccgtctccatcgagcagttcggcctgcagggcgacggcgctcagaacatgatcgacctcggcatcaccgccgagcacgtggtggaagccgccaaggcctccatcgccgaagtcgaagccgccaagtgagtcccctagcctccctctgacgagggaggcttgtactcaagactccacctgatcggccctctcgttagagggggtctacttaaagatttgttccaatacggaatataaggagaaaaaaaaatgactgaagcaactcagcgtacgtctgacaacggcgtttccatctggctggacgacctgtcccgctcccgcatcgagtccggctccctgcaggacctcatcgccaacaagaacgtcgtcggtgtgaccaccaacccgtccatcttccagaaggccctgagccaggtcggcccgtacgacgctcagctcaaggagctcggcaaggttgacgttgagaccgctgtccgcgagctcaccaccaccgacgtgcgcaacgccaccgacatcttccgcgagatcgctgaggctaccgacttcgtcgacggccgcgtctccatcgaggtcgacccgcgtctggcccacgacaccgagaacaccgccaagcaggctgtggaactctgggagaaggtcaaccgcccgaacgccatgatcaagattccggcaaccctcgaaggcctgccggccatcaccgccaccctggccaagggtatctccgtgaac

SEQ ID NO: 18 - DNA, 2489982 bp, Bifidobacterium longum (residues 1,244,992-2,489,982 of 2,489,982)
  source 1..2489982: mol_type = genomic DNA
gtcaccctgatcttctcgctcgagcgctacgagcaggtcatcgacgcttacatcgagggcatcgctcaggctgccgccaacggccacgacctgaagcacatcggctccgtcgcttccttcttcgtgtcccgcgtggacaccgctgtcgacaagctgctggaagccaacggctccgacgaggccaaggctctggagggcaaggccgctgtggccaacgctcgcctggcttacgaactcttcgagaagaagttcgccgaggatccgcgttgggccgacctggctgccaagggcgccaaggttcagcgtccgctgtgggcttccaccggcaccaagaacgccgcctactccgactgcaagtacgttgacgagctcgttgccaagcacatcgtcaacaccatgccggagaagaccctgaacgctctggccgaccacggcaacggcgctccgtccatcgagggcacctacgaagagtcccacgccatcatcaacaagctggctgagctcggcatcaacctcaaggacgtcaccgacaagctggaggccgacggtgtcgctgccttcatcaagtcctgggattccgtgctgtctgacgtccagtccggcatcgaccgcgtgaacgcctgagatttgacgactgatgcgtgtttagcgcactagttgattagctcacagaagccccgaccccaacggtcggggcttctttcgtttgttgctacagtggtacgagcatatgagagaaaggccgaatcgtaatgaacaaacttgtcgcacgccagcggttggtgatgaccttcaccttcttttcgatgttcttcggagcgggcaatctgatttttccgccgttcgtcggcgcgcaggccggttccgcgaccataccggcggccatcggtttcatcgtctccgcagtcggcctgccgattctcggcgtgctggcggtcaccttcgccggcggtttcgacaaactcgccagccgggtctcccccaaattcgccttgttcctcggcgtggcgatcatgctcaccatcggcccgtgctttgcgattccgcgtacggcgaccacctcattcgaaatgatggtggctcctttcgtaccgtcctcctatggctggctggcccaactcatctactcgctcgtgttcttcacactggcgttcctgttcgcccagcatcccgagaaactctccaaagtgctcggccgattcatgggaccgttgctgctggtgctcattgctgtcctgttcatcgcctgcctgatccacggcatcggcatcccggccaacccgatgggcgactactccacaaaccagatcgcacgcggcttcctcgacggctaccagaccatggacctgctcgccgcgctctacttcggcatcgtgatctccgcgaatattcgcgcccaacaagtcgatgatgaatcgcaagtgcagaaggagaccgcgtatgccgggctcggcaccggcgtactgctgatcgtgatttacggcgcgctaagctacgtgggcgtggtgtccggcgccatcgccaccatcgaccccaccaaagacacgggcgcgaccgtgctcaccaacctcacctcatccctgttcggcacgttcggtaccgcgttccttggcatcgtgttcgtcatcgcctgcctcaacgtatgcaccggactgatcggcacctgcgccacctacttccatactcggttccggaccgtcgccggccgaacgttgagctaccgcacctggcaggtcatcttcaccgtgttcagtttcatcgtgtccaatgccgggctgagcgcgatcatcaaggtttccgtgccggtgttgtccgcactgtatccgatcgccatcgtgctggtactgctgacgctgacccacaagtcgctcggcgcgcgattcccgcgcgtctatttctggactgtgctgctggtgggcatcgcatccttcgccacctgcatctccagtttggtcgccgtcttcggcggttccatcggctggctggacgcggcgctggctatgctgcctttgcagcaataccagctcggctgggtggtcccggctatcctcggtgttgccattggtatcgccgatgctccgcgacggtagttttcccggtctgtgccggagtctggcggtcggtcggtgatggcggctgccgcagtatccctcctataaagcggcatacagaattcctgtatgccgctggtctccgcccatctgccatagttatactggcatcatcgacgacggcgataacagcataaggtggggcgagtcatggacaccagtgatagacaggtagcggaaaccggccggaatcgcgagcttgggctgattccggccatggtgatggcggttgttgcgacgctcagtggtgccggtgtatcgttcgcgccattatatgagcgcatttggggcggcatgatgttgcatccgaattgtccggcgattggcagaatgacctactatctctcggaccaagcaactgacgattatggagcctgcgtcacctcaccactgtggtttatgacggtgactgcgctgagtgttgtcgcgattctctgtctgactgttgcgggagtacagggcttttcgcgccatcggctctgttcggtgtttagtgttcttattgcggcagtggctgttgcgatcatattggtgttgagtgcgaataccaagattgtaacgttgtgggcgatgtatgcggtgacgtggctggtgcacgccatagtcacctcatatctgagcaacggttggatacgaatcgcgcgactgttgttcgtatggcagattggcgtgatgccggtattcgtcaccgaatattcagtatccgacgaggtcaacttcagcggcggcgcaaccatcgcttgcggacttggacttgcggcatatgcgctggtgcaatacgcctctcttaccatcgactcgcaaaacaacagtaatcgaatcacgccagaacgcagtggtatacgggctacctccttgcacgacctgttccacaccatcagcatcaacgcatccgccatacgcaattgctctgttcccgttgccctgttctggtcaggtatcacgttctttacctacagctacaacactggtagacacaccgatttctgcccagcgctatcggcaactgacaatgcaggtcttgtcgcttattgcatcggccatgaagctttgggactgctgaccgtcgtgttgtgcgtgctgccattgttctccctgctttcggcgattacggccatcacgttggctgcacgcaacgcaaataacggcggtaacgctgccaatgccgatggctctcgaaattcagccgccgtgtgctatctgctcctggcaaccgcactgtccgccacggccttcgtcatcgccttcaccttggcatagcgcggaccaccatgccgcggttcgcgcgatcgctgggatacagcgcttcctgcgcacgacgcgacaccaccggcataagatctcctttatatcacgaaacaatcgagcgtgttcgtttgcgccaaggatcagctctgccagtagtagctgaagaagtcggagatctcccccatggtttcgcgcagcatgcccatgcgcggcaggtacaccacgcggaagtggtcggggcgatgccagttgaacgcgccgccgtggctgatgaggatgtgcttgtcatgcagcaggtcgagcgcgaactgctcgtccgagtggatgttgaagcgtttgacgtcgatcttcgggaagatgtagaacgcggccttcggcttgacggcggtgatgccggggatctggttgagcatgtcgtagacgaggtcgcgctggtcgtgcacgcggccgcccggcacgatgtagtcgttgacgctctggtggccgccgagcgcggtctgcaccacggactgggcgggcacgttcgaacacatgcgcatgttggcgagcatgttgaggccctcgatgtagtccttggcaatgcgcttgttgccggacaggatcatccagccgatgcggtagccggcgatcatgtgcgatttcgacaggccggagaaggtcacgcagaacaggtccggggccatcgaggcgatggagatgtgctgcaggccgtccatgacgaggcgatcgtagatttcgtcggagaagatgatgagctggtgttcgcgcgcgatgtcgacgatctgctggagcacttcctttgggtaaagtgcgccggtggggttgttcgggttgatgatgacaatcgccttggtgttgctggtgatcttggagcggatgtcgtcgatgtccggataccattcggactgttcgtcgcacaggtagtgcacggcggtgccgccggccaggttcacgcaggcggtccacagcgggtagtccggggatggcacgagcacttcgtcgccggtgtcgagcagcgcggacatggacaggttgatgagctcgctgacgccgttgccggtgtagatgtcgtcgatggtgacgttcgggatgttcttcagctgcgcgtactgcatgatggccttgcgcgcggagaacaggcccttggacggcgagtagccttcggtgtcggtgagctggtgggccatgtcgtagacgacttcgtccggcgtgcggaagccgaagggtgccgggttgccgatgttcaatttcaggatgtgggtgccgttggcctccatgcgcatcgcctcgtcggcgaccgggccgcgcacgtcgtagagcacgttgtcgagcttgtgcgatttgccgaaggtgcggcggcggcccacgggaatctcgctgtccgtctggggcttggcggcacccatggcaagcggtgtggcggcgtgttcgccgtccgtgacgctgttggatgcgtccgagttcaattgcgtggtggattcctcgccgcgcagccagttcgtgtcgacgtccagttcgctggccaggaattcgagcacgtcctcgcggggcatggtcttgccggccacatattggctgatgtggctcttgcccatctttacgccacgatgttcggcggcgtgcaccaaatcgacctgcttcaatcccctgctgttcatcgcattgcgcagacgttccgcaaacaccgatacgctcatatccttatgcctccaaccgggagttcaatttatcttttgaacaacggttcaaagcatacccccggttcaacacaagttcaattttggcgtgttctcgagtctcgaccggttcaacccaactgcgcttcaatccattgggcgacgccgtcctcgttgttggacgggcaaatctcgtcggcgatggacaacaccttggggttcgcgttggccacggccacgccccggccggattcgctcatcatgttgatatcgatgaggtcgtcgccgaaggcggctgtctgttcaagcggcacgtccagtcgctcgcacagcaggtgcagcgcgtgctccttgttggcctgcgggttcatgagcatccacatcacgccttcgctgatggagatgtcgaagtccggcggaatcagcgcacgcagctcgttccactgttcaggttcggggaagatggtgattttgtccgccacgccttcgggcacgtcgtggaagttcgtgtattggaaggcctgagttttccaatacacgcgcacatcgaagttggtgtagcgcacgtcgttcatcacgatgccgagcttcaggccgggcatgcgatcgagcaggaacagacagacttcgcaggcacgccgtgaggagaagccaatcttgatcaaatggttctcatcggccggcgtggcacctgaggtgagcaggtcgaagtcggagtgggccgggtcgaaatcgatgagggcgccgttcagatagattacggcgtccaccggcagtttttcggcgaactggagaccggtactcaccggccgcgcggtggcgatggcgaattgcattccggcatcgtgcgcgcggttgatggtgtcgatgctgcgctgggtgatgaaccggtcctcgaatacctcggcgtcgtgcagcaacgtgccgtcgaggtcggcgaccagcagtcggggttgtttcggcgtgatggcgtcgagaatcacagcagcccctcacagtgttcacgcacgagttcggcggaatggtgcagtttggcccgctcgtcctcgctcagatcgagttcgacgatctcgttggcaccattggcgcgcagttcagtggggacgccgaggaacacgtcatgttcgccgtattcgccgtccagcagggtggagacgggcacgatgcggcgttcgtcccacaggatggtctgtacgatgccggccacggtggaggcgatgccgaagttggtgccgcccttggccgcgacgatctcattgccacgggtgcgggtcttctcttcgatttcggtggtggacacggaggcgaaacggtcttggttgtcggccaggaagcgggcgaatggcttgccgccgagcgagacggtggaccatgcggtgaactgggagtcgccgtgctcgcccatcacgaagccgcccacgttgcgcgggtcaaggccggtctcttcgccgatgatggtcttgagacgcgaggtgtcgagcgcggtgccggtaccgagcacctgggtgcgaggcagaccggaacgtttccaggcataccaagccatcacgtcgaccgggttggagaccatgacgatcacgccgtcaaaaccggaggccatgacgttgtcgaccacttcgcccacaagacccacggtgaagccgagttcggccatgcggttggagttggccggcggcttgcggcccacggtgatgacgacgatgtccgcatccttgcagtcggcgtagtcgccggcgcgcaccttgacgtggcggtcctggaattcgctgccatcatcgaggtcgcgggcctcccccagggccttggcggcggaacagtcgatgagcacaagctcattgcacaggccgtgcgtgacgatgccgaaggcggcggtggcaccgacccggccggtgccgacgataacgactttgttgcggttcatagtgaccatggtgatgtcctttcgtaatactcgatagaacgcatacgacccatgaccgacggtaacggtcatgggtcgcgagcgacaagtctatatggcgtgcaagccgatcagccgaggttgaacttggtcatcatgtcgaggccgatgatcaaggccacccacaccagagcgatgataacggtccaacggttcaggttcttttcggcgacaccggaagtaccggcgttctgggtcagaccgccgccgaacatgtcggacaaaccgccgcccttgcccttgtgcataaggataagcagggtcagcacgaagctgagcagcacgacgatgacttgcagcgtgatcttaagagcggtcacagggtacctccggattgattggactgttgaccagcatagcgcacacacgggaaaaccgtggtattagttccgtgatttcgtggatttcagtgccagtcgagcgattttggcgagttcctcaacgtccagggccgcccctccgatcaggaagccgtcaacgtcgggctgggaaatgagttccgccgcatttttcgaggtgaccgatccgccgtacaggatacgtacgctatcggataccttcgtgccaaaagtggtcttcaaatcgttgcggatggcgtttgcggcatcctgggcggattgcggagtggccaccatgccggtgccaatggcccagacaggttcgtaggccacgatgagtttggcggcttgttcttcgttgagatcgcgggtgacgtctcgtacctggcccacggcgaaatcgagttcaatgccttgacgtcgttcctcgaagctttcgccgacgcacaaaatcggctgcatgccggcggcgagcacggcacgtacctgatcgacgatattggcgtcatcttcaggatggtatttgcggcgttcggagtggccgacgatgacgtatgagcagccaagatgggcgatcatgtccgcggacacatcgccggtgaaggcaccttgggtggtcacggaaacggattgtgcgccgtaggcgacatggagcttgtcggcttcgaccagcacctgcacgctgcgcaatgacgtgaacgaggggaaaagcgcgacttcgcagcgtttaaagtcgaagtgagcgtcacgcaacagccataccagcttctgcacgaagtaagtggcttcaagatggtcgaaattcatcttccagttgccggccaccaacggaatgcgtttggacgccatatgtttcccttctaaaaaaacgtagctcccctcaaggaggggagctagaaaatggattactcaagcaccttcaggccagggagctccttgccttcgaggaactcgagggaagcgccaccaccggtggagatgtgggagaagccgtcctccgggaagccgaggttgcgcacggcggaggcggagtcgccgccaccgacgatggtgaacgcaccggctgcggtggcgtcgaccaaaccctgggccacggccttggtgccggcggcgaactcaggaacctcgaacacgcccatcgggccgttccacacgacggtcttggagtcaacgatcttgtcgtggaagagcttctgggactccgggccgatgtccagacccatcttgtcggccgggatggcgtcggcagcaacgacttccggagcaaccggggtgtcaccggccgggaagccggcgttcacgacgacgtcggtcggcagcacgagctcaacgccgttcttctcggcggtctcgatgtagcccttgaccttctcaagctggtcctcttcaagcagggaggtgccgacctcgtagcccttggccttgaggaaggtgaacaccatgccaccgccgatgaccagacggttggccttgtcgagcaggttctcgatgacgccgagcttgtcggagaccttggaaccgccgagcaccacggtgaacggacgctccgggttctcggtggccttggacaaggccttgacttccttctcgaccagcaggcctgcggcggccggcagatcggcggcaacgtcgtagttggagccctgagcgcggtggaccacgccgaagccatcggaaacgaaggcctcgccgagggcggcgatcttcttggcgtaagcggcgcgttcgtcggcgtccttagaggtctcctccgggttgaaacgaacgttctcaagcagcacaacgtcgccatcgttcatggcggcgaccttggcctgagcgtcctcgccgtaggtgtccttggccagcggcacgttggcgccgagcagctcgccgaggcgggcggcaaccggggccaggctcagctcaggaacgaccttgcccttcgggcggccaaggtgggccatgaggatgaccttggcgccttcttcgcgcagggtcttgatggtcggcagagcagccttgattcgaccgtcatcggtgatggtggtgccgtccagcggaacattgaaatcagcgcgaaccagaacgcgcttgcccttgagatctccaaggtccttgagtgtcttcatgaatatcctttccttgacgaatcgcacgtcaaagtggccaattttgccactttgcatattacaggcattccggaacaaaacaccgcattcgtctactgactgaatgcggtgttttgtcacatcgttgtcgcgttttgccgaataggcacggcaaatcggattgtcgggttacttgccttcggctgcgcgagccttctccgtcttctcggcaagttgaagcagtcggcgaattcggccggcaatcgcatccttggtgatttgcggttcggcgatcttgccgagctcctcgaggctcttgtccacgtgatcgatgcgcagctggccggcctgacggaggttgtccggaatgttatcgccgagtacttcgaaagcatgctgcactttttcgctggcttcggcggcggccttggcggaacggcgcatattggcgtcatcgaagttggccagacggttggccttgccgcgggcctcgccatcggaacgcttgccggtccattcgcgagccgaacgggtggcgcccatgagcttgagcatgcgttcgatggcgtcgggatccttgagcgtcacgcgctcggagctacgcagcgtgcgatgcttggcctggatgcctagacgacgggccacgccacacagggccatggcggcctcttccgtggggcaagcgatttccaggaagctggccttaccgggatcggacaggaagccacgggccatgaaggcgccgcgccatgccgctttgatttgggcgatggatccgttgaccacttcagacggcagtccacggacctgctgcttgcggcggtcgaccagtccggtctgcaaagccaaggccactacgttgcgggtgacgagcaccacgtaggtctcgacagggccgttcggggtctgacgtgtgaggtgattgacctcggcttcgtgcccgaacgcgttcctcaacgtgttcttcagccattctgcaacgtcaagcgaggtgaatacggcttggataacgtatgtattctgtaccggtcgaagaccgccgccaaaacggatcatggccgcagcttgggccttgatcgcggctggcgaatcgccttcaaaggctgccaactcgcttttgacatcgtccagaagagccaagatctacctcctacagtcccgttcttctcaatgcttcaggcgcttcgtgccgttatctgctgtcacacggtcggaagccatcggctttctgtgatacctaatctggtggacaagcgaacccgtttgatacgtattatgggccctgctttctcgcagtgtggtcaccgaacacttgcccgatgaccgctcgacgcctgcttacgatgagtgacgcttgtgctgttctctcgcggaaacggttacgttgagcccatgtgcgcgtaagcggcgagccagctcttcgctcatcgccaccgaccggtgctgaccaccggtgcagccgacggcgatggttacgtagtgcttgtcttcctgggcgtatccttccaacgcaatctcgatagctttctcataagcgtcgagaaattccttggctcccttgctggaaagcacgtagtcggcgaccggcttgtcgtgcccggtaagctcgcgcaggttgggcacccagaacgggttgggcagaaaacgcacgtcggccacgaaatcggcgtcgatgggcataccgtatttgaagccgaagctgaagatgtgtactgccacggtggtggggccggagccgagcatcgcctcgtagagtttggtggacagctggtggatgctcagggagctggtgtcgatgacccagtcggctcgttccttgaggtcttccagcaggtgacgttcctcaaggatgccgtcgatcagtcggttgccgtgctgcagcgggtgcgggcggcgcacggattcatagcgcttgatgagcacttcgttgctggcgtcgaggaacagaatacgggttttgacgccgagatcatccagatggccgagcacggcggccagctcgtcgaaatagctggagcgcacgtcgatgacggcggcaagcttgtggacgcctgactccgatccggaaccggaggtggtcatcatgtcgacaagcgggataagcagtttgggaggcaggttgtcgaccacataccatcccatgtcttccacgcagtcagcggcatgagagcggcctgcgccggacataccggtgatgagcagcacttcgaaggcatcaagcggggtcggctggttgtccggagtcgatgtggatgtcgcggaattcgccggcgcattcgtggcggccgcctcgccggtatcgcggttcgttgtctgttgattcattacagcgcctcctcaagagctttgcgcatcgcgatctccagctggtcgtcttcggtggtggtgtcctgcagacgctggtcggcatcgctgggcgggtcgtcatcccagataccggtcatcagcaatacctgtacgagagcttggtacagcagcatttcttcgccgccgatggcgtgaccgccatgagcgcgccaggcttccatgagcttggtggggcgtggatcgtagatcacgtccaacagcagtccggagaatggctcggttccggcattggcgagggcatccgcgacgttgtcggccgcgtgtccgggaatcgtgttgatgacataggtggcgttgcgggctgcctcaagcagggcctgatcgtcgcctaattcgatttcgttgtacgggttatgcacgttgacgaacttttcggccactggtttaagcccggtgttttttccggggtgacgggcggcgacgacgatatggccgatttcgggcatcatgcagcatgcggccaacgccgaagtggcggtgttgccattgccgatgatcagcgcggtgccgcttctcgacgcggtgtggtgttcgccgagttcgcgattggcatggtcgaaggcgagttggatgccgatgacatcggtgttgtatagcttgatgcccggcttgccgttcggccaagcgggatcatcggcagccacgctccagtcgaataccgcggtattcgccaccttcagttccttggcccacaaattttccggaacaccgtacggttggatggtcttcttcaacggcatggtcaggctcaggccagcccacgtcgagtcaaggcctttgaggaaagcgtcgaggtcgtcttcccccacctcgtgcttgtcgtacagccaatcgtcgagtttcagcgaacggtaggccgcgttgtggagcacgggtgacaatgagtgtgcgacgggtttgccgagtacagcgcaacgatgattggccatatcccctccttgatgtctgttcccatgctagccgacactttgcttcgaatatgtcaaccacaggccccgcaaccgaaaatttactctgggctgctggaccgggccggctcactgctcgtgcagcgcggtgtacagcgcttcggctttggcgtggccgatgcctttgaccttctcgaagtcctcgacactggcttcgcgcatggctttgaccgagccgaagtggttgagcagccgcttctggtagctttcgccgatgccgggaatctcgtcgagcgcgctgcgcagggcgcctttgcgccgctgctggcggtggtaggtgatggcgaagcggtgggattcgtcgcgcacacgctgcagcagatacatgccttcggactggcgtttgaggatgatcggatagtcgtcgtccggcacccacacctcttccaagcgtttggccagtccgcagacggccacgtcgttcacgccacagtcctcaagcgccttggcggcggccatgacctgcggcttgccgccatcgaccaccaccaggttcggcttgtaggcaaagtgatgccggtttgtgttctgctggacgatgtcgggcggggactcccgcgcatcgttctgcactccgaccggcaccgcgtgccccttgccactgatgtcggaaccgccctcaccattgtcgttaccgttcgcagcgattgtctccgccgccacggcagtggtcatcttgccggcggccgaggccacacgctgttccgcgtcgatgctttcgccggagtcgccggcgatgttgccgtgcttgaagcggcgggtgagcgtctcgtaaagcgcggacagatcatccaccgcgcctttgccgtccttgcctcggatggcgaagcgtcggtattcggatttcttggcgatcgcgtcttcgaacaccaccatggaggccacctggaaggcaccgcccacagtgttcgaaatgtcgtagcattcgatgcgcagcggggcttccgcgagtcccaatgccttggccacatcgttcatggcctgggcgcgtgcgcccatgtcggagatgcggctcatcttgctgcgttgcagtgcttggctggcgttctcgttggcgcggtccataagctgcttcttgtcgcctcgcgaggccacacggatggtcaccgctcccccgcgcagattggtcagccagccttcgagttcctcacggcgggccggttcgacgggcacgatgatttcgcgcggtaccggtgcgatgggtgccagcaggtccgcgcgcccggtggtctcctgacgggtgttgcgttctcgggtggcctgggcgcgtgccacagcgtccgtggccgtgatggtttgcgtggagccgatggcctcgcgattagtggagatggtcgcggccgactgggggtgattgtccccggcggcgtccgaatacacctgcaccagaaggtcggccatcaagtcggcgtcatcgatgtcctcaactcgttcgacgctccagttgcgttcgccgcgaatcgagccggcgcgcacataaaaagcgtgcacggaggcttcgagctcgtcgctggcgaagccgaacacgtccgcgtccacatcctggtcgaagacgacggcgttctgttgcaccacggtttccagcatttggatctggtcgcgcagtcgggcggctttctcgaattcgagttcggcgctggcctctttcatgtcgcgggtcaactgggcgatgtatggccgtccgagtcgtccggtcatcacgccgaccagctgttcgcacagcctccggtgttcgtccgcttcaatgcggttcacgcagggtgcggagcatttgccgatggaagcgaacaggcatggccgtccggtcagttgcgccttatggaacacgttggtggtgcaggtgcgtaccgggaacgtgcgcagcaaccggtcaagactgtgccgcaattcccacactttggcataggggccgaaataccgggtatcccgccgtttgcgcgaccgcgtgacccacacgcgcggaattcgctcccccgtgctgaccgcgagatacggataggtcttgtcgtcgcggaactgcacgttgaaccgtgggtcgaattccttgatccacgtgtattccaacgtcagtgattccagttcggtggcgacgaccgtccactccagactgcgtgcggtcagcaccatggtctgcgtgcgcggatgcagcagatacagcggctggaaataattggtgagcctgttgcgcaggttctttgccttgcccacataaatgacgcgcccttccccgtcgcgccatttgtacacaccgggtttggcgggaatatccgaggtcttgggtcggaacaggtcgcgagaatcccccagcaaaggtgccccattcgcattcaccttcgccgtcgtttccccggcacccacagctacgctttccggcattaacgccgccgcagtcttccgccactcatccggactatgccgctcaatatcgttcgtcataatcctcctcgctattaagcaaaaccaatcatcagggattgggtgggttggggtgtgtgttgctggaccgtaaagacttggcctgagcggcccggagcatgtccagcgacaaacaccccaacccacccgaggtcagctgcaatggaaggctaaagcatgggtttcaggaacttgccggtccatgaggcttcgcattcggcaacctgttcgggcgtgccctgcgtgacgatggtgccgcctccgtcgccgccctccggaccgagatcgatcagccagtcggcctccttaatcacatccagattatgttcgatgacgatgaccgtattgcccttgtccaccagggactgcagcaccttgagcagcttgttcacgtcttcgaagtgcaggccggtggtcggctcgtcgaggatgtacacggttttgccgtcggatcggcgctgcagctcggtggcaagcttgacgcgctgcgattcaccgccggacagggtgggtgcgggctggccgagtcggatgtagccgaggccgacgtccacgagggtcttcaggtatcgggagatgccggtgtacgccttgaagaagtcggcggcctcctcgatgggcatgttgaggatgtcggccacggtcttgccgttgtacgtgacttcgagggtctcgcggttgtatcgtttgccgtgacagacctcgcagtccacgtagacgtcgggcaggaagttcatttcgatcttcagcgtgccgtcaccgtggcaggcctcacatcggccgcctttgacgttgaaactgaagcggccggggccgtagccgcgcacctgggcttcgggagtcttggcgaacagggtgcggatcttgtcccacacaccggtgtaggtggcggggttggatcgcggcgtgcggccgatcgggttctggtcgacgtggatcaccttgcgcacctggtccatgccttccacgcgcgtgtggcggccgggtacgatgcgtgcaccgttgagcttgtcggcgagcaccgggtagaggatcgtgttgaccagcgaggatttgccggagccggagacgccggtgaccacggtgagcacgccgagcgggaagctcacgtcgatgttcttgaggttgttctcgcgggcacccacgactttgagcacctgggtcttgtggatcttgcggcgcttggcgggcacggcgatctctcgcctgtgggcgatgtagtcgccggtgatggagcgcttggcttctatgaggtgcttggcggggccggagtagatgacttcgccgccgtgttcgccggcgccggggccgatgtctaccacccagtcggcgcggcgtatcgtgtcctcgtcgtgttcgacgacaatcagcgtgttgccgagatcgcgcaggtggtgcagggtttcgatgaggcgttcgttgtcacgctggtgcaggccgatggacggctcatcgagcacgtacatgacgccgaccaggccggagccgatctgcgtggcgagtcggatgcgctgcgcttctccgccggacagggtggcggccgcgcgcgagagggtcaggtagtcgaggccgacgtcgttcaggaagccgagtcgggccttgatctccttgagcacttcgccggcgatcagctgtgccgagccttcaagtttcaggccgttgatccaggcgagttcgcgtacgacgggcatgtcgcacacgtcgaagatggattttccgcccacagtgacagcgagcacttcgggcttcagacggcgtccgtggcagacctggcagggcacttcgcgcatgtacgactcgtagtattcgcgcatggactgcgaatcggtttcgtcgtggcgtcgcatgagtgtgcggatcacgccttcgaagccggtggagtattcgcgcaggcgtccccagcgattgcggtaggagacgttgaccttgaagtcgtggccgtagaggatgtcgtgcttaacgtcgtccggcaggcccttccaaggggtcttcatggagaagcccatttccttggccagaccttcgaggatgtggccgtagtactgggaggtcatcttggtgccgctccacggttcgatgacgccgtcggccagtgacttgtccgggtcggagatgatgaggtccgggtcgatttccagtttgaagccgagaccggtgcaggcggggcaggcaccgtagggggcgttgaaggagaaggtgcgcggctcgacctcgtcgagttcgagcgtgtgcccgttcgggcagctgcggtgttcggagaacggctggcggcgggccgggctgccttcctcctcgtccacgaagtcgatgacgatgctgccgttggcgagcttgagggcggtttccaccgagtcggtcaggcgttggcggatgccgtccttgaccacgagtcggtcgaccacgacctcgatggtgtgcttcttctgcttggtgagtttgatgtcgtcggacagctgcgtcatctcgccgtcgatgagcgcgcgggcgtagccgtcggagcgcagcagctcgatcatatccgcgaactcgcccttgcggcccttgaccacgggcgcgagaatctggaatcgcgtgcgctccgggtagccgagcagcgtgtcgacgatctgctgcggggtctgggaggcgacgggctcgccgcattcagggcagtgagggatgccggtgcgggcgaagagcagtcgcaggtaatcgtagatttcggtgatggtgccgacggtagaacgcgggttgcggttggtggtcttctggtcgatggagacggccgggctcaggccctcgatgaagtcaacgtcgggcttgtccatctgacccaggaactggcgggcgtaggcggatagggattcgacgtagcgtcgctggccttcggcgaacagggtgtcaaacgcgagcgaggatttgcccgaaccggacaggcctgtgaacacgaccatgcgattgcgcggaatcgccaggtcgacattcttgaggttgtgttcgcgcgcaccctgaatcgtgatcttgagatcgttcgggatgtgcgagatatcagctaccagcgaaccatcgtgttcaatcagcggcgcctttttgatctcccggctcaggaaggagtcgctggtcatcaccttttcgacgatgacctcaccgttcttgcccttgccggttttcgcgcccgttgcgcttgttgcgcgccttgcgccagtctgcattgccgccacagccacaccccaccttccatctcaccgttcccgcgcgcacggtcatgcgcgcgccaaatctgtcccaaggatacccgaacacacgaccaaattcgaacgcttgttcgatggcgtgtcaggccggaaaactgaaccagagtatgcaaaattccggaccatcagtggaccgaaacgcaagagccggcccccaagatactcggggcgtccggctctcacttccatttccccagcggggttggcttaccatgaagtatacacggttttaggacatcaatcactgtcgatgaacactgttcgaacatggccgaggaattcatcgtatcttccagtaccggcctgggcatcaccgtacgctcctagcagctgatcagggagccatagccttgcatcagtctcccctgcacagagttcgacacgaattggcccgataaatctgcggcttctcaatccatcgatgaaacggatatcgttcctgtcctgtgaaatctcgcgccgttcaagcacaagcgtgtccacgttgtattctgtttccagcagaggcagaagacgttccaaacatttacggcgagcgcgttcggcggtattccactggctcattggtaccgcagccacaatgacatgatcaatgtccattgcagccatggcatcaacgactttgccacgcaatgatggccgcatgtctcgccagtgcaatttccttgctcctttgggcttaagcaacgccaatctttgccttgtttcggtttccgtatcatcacatacgcatgcgcccatcaagtacataggcgagggaactccggttttccgcacactctcgtcaccccaagcggttgccatgtttgtcccttctcgcgcaacgcaaaacaacagttcgatagtatcggatagcagtgccggaccttgcagctatgcaatgctgttgcattattaatcggaaggcataatgtgagacgagaaaaagctaagccgttctagctcttggcgacatccccaatcactcagcctaaatcggcaaatcctgattttcaatggactccacggggatgccaagcttgcgtaattcgtcaactgcatcacgcatgggaatgcgttcctgttcgatacgccgataagcgattgttttgtcagcacacagtcgttcataaagacgtcgctccgccgattgaaggccgggcgtcggcttaggctcccgcatagcaatcttcgcgctgcgttcagtacgatcggtaccaaatctgtggtaccgatcgtatgcatcgcaatccatcaggatggagtcgcattcgatacctgattcacgtaatgtcgaaagtatttccagtccatccgcatccatatcaccccaatacacgatacgcatgtcacgcagtgcaggaaccgcaggtacagcatcgcttacagcgcgaccagaaccccatatgcagatgccctgcgcaatcggcggcatagtctgatacgtgtctttgttctcaacgatgacagcatatttaatgccggataacgcttcgccttcccacggacaccatatgatgcgttcgagctcagcatcgtcgcggaccggatcgagataacggaaccgcagttcggtcggccgttttgacagacccaacgtttcgacaccgagcagtcggcaaatggccttacgacgattggtttttgactcattcagccatttgccgctgaatcctgtcagtggaatctgtcgcggcgtcataccggtcacgtcatgatgcctgaaatatcgaactgcgctgacaagcagatcgaagtcgtcaggctgttcatggcctgtcatgcgagcggccgattcgattgtttccggagcaacgtcacaagcagcaaccagacatgctatgcggcggcgcgcttcgcgacattccgccgccagcgtacgaccaaccacacgcatggctattgattcgtcaggaacgacgactttggagatcagctcgacagaggtgcctatggtgcgatgcttggttatgatttcgcaaccattcttgcttgcccattgccgtatctcattgttgttgtcatgcaccgcaatcgcattggtttccaaaaatgcttggtccggcaatcccaccggcacgggaaatggccatgccggttcgatgtcgtacatatgtgaacgcatatgtttcttcacgcatgtggtgatcgcagcgatgtctttcatgccggccatagttcccatcacctgctttcgaacatcgtcgagtcgaaccgaatcgtcttaataccggcgacgccaggactgctcattcggcaaccccgtcatccttcaatatatccgacgatgattcatcgtccatgtcattctgatgcagcacagcctcgcgcagggaggtgaggccggtgtcggggtccttgtaggtcacgtaggccttggtggagacctcgaggatttcgccggtcttgctttccggggcggagacgatgacctggaacccgaggcgcggcagcaccgtgagggcgcgctgcgtgtaacggccgtcggccttgatgagcgcctcgtcgaggaacagcgtggtgtacgagggctcgctggtcaggccgccgccgagcaggtagatgagcgccgcgccgtatacgaatgaggtgagctcctgcaaggcgccgcccgaacggccgccggtggaggtgatgcgttcatccgggccgtcggcatgatgcacgatggcgtagaaggacgagcggcagcgcgggtcgaggttgcgggcgccgtagcttttcacgccgttcgcgtccttgacctgcgcgagttcggcgcgcagcagcccgaccatcggcgcgcaggccgcgaaagccttgcgcgaggcgtcggaatcgttgacgtcggcggatttccaatcgttcagggtgccgatgacgcggatgagctgcgcccagaaggtgcgctcgggacggcgcacgtccgcgtgcagggacaggctgccgtgcttgggaccgaactgctggcctttgagcatggcgttgatgcggtcaagctggtcgtggatgtcgctggcatccgtgtcgatggcgcgtttgatggtcaggaagctcctgagcagctgttcgaggcagcgccggtattcggcgtcggtggcggcaaccgcggccagctgggtgaggctggcgagttcgtcgagatagtaccggtagtcctccacgctggcggtcagcgaatcatcgtcggccgcgtagagcgcgatgtaggtgctcattttcgattcgacgccggtgcgtgcggcatcggcctggccgttcagcaggttgatgcgggaggccatgtccttgccgatgccggcgatggtgcgttcggggaagctctcccccggcgcctgcgttcctgccgcgcccgcgccgatgatcatgtgcgcgcgcatggcggcgtccgccagtccggcgaatcggttgtcgtaggattcggcgagcgccgccgtgacttcgtccggcagcgggccggacgcggcgtcatcgtcattgtcggcggtggcaccggcggcgtccgtcgtgccggtgtcggcatggtcgcgcagccagatgagcgccgcttcgacggcgctgccggcgcgggccgcagcctggtcggattcgatgcgctggcgttccacacggtcgagttcggcgttcagttcgtcgcgctgtttggcgagtccggcgagcttgggatcgtttttgatggatgcgatggcgtcctgcgtgtccgtgatggtccgttgcgcgccggcgatgtcgatgcgctcccaggacgtgtaggcgagctggttggccagttcgagttcgcggtggaggttatcggactgtgttttggcggccgtgtagtcggtgtcggcttggccgagcgcgttgcgggcggcgtcgacctgcgctgcgagcgcgttgaggtaggtttcgttgacgaatccgatgacctgggcgcggtctttggtgccgtgctggccgcgtgcgccggatttgatctgaccgtcggcctgcacctgacggttggtgcggtcggtgtcgtcgatggcggtgacacatagggcgtcgaatcgttcgtcctgggtctgcgagcgcagccagtcggcgaagggcgagtcgtcgcggtagcgcagtttgccggacagccagtcgccgtcctgttctccggtgagtatgttcgcgtgcgcgccggtgttgtcgtagtggcgtgcggtgtccacgaactgccaggtgcgtcggggcatggtgcgcgggtcgatggtgctgactttggcggcgaagccctgttcgtggcgcttgtcgacgaggatggtctgggcgatgggcgcgtaggcgacgttcatggcgagacgccagtcttcctcgtgttcgttcacgtccatgagttcggccacgtacggcagttcggcgggggtgagtccggtggcgcggcagagcatggcgcgggtttcgtccatctgctgggagatgcgggtgcgctgggagcgttgccggtcgaagtcgcgttgcagtcgttcgaggtcgccgcgtgcgccggcccgcgcgttgatggcggcggtgagggcttcctcgcattcgccgtctcgtttgttgtattcgcgtttgaagttcacggcgttgatgcggcgttcgttccaggcctgttcgtcgccgggcagcgtctcgccgatggatgcgaacgtttgttcgattcgtgttcggttggcttgcacgtcttcgagggtgcggcgggcctggtcgagttcgagttcgagtcgggtcaggttgccgccgtccagaccctgcatctggcctcggatcatgtcgagacgggtgcgcaggtcttcggttcggcggcgcagcagcttggcttccgcctcgctgttctgttgttcggcgcggtcggcgggcagttggacggcgacttcgccgcgcatgcgggccaatgcccagtcgcgcagcacggccggtaccgtgccgtcgacggccggcttgaccggttcgaaggcgcgggccttgccgcgtgcggcggcgtattcgccgtaggcctgttggatgccgcgcagcgtgtccatgcggcgggtcttctcgtccatggcgtggaagttctcgtcgtaacgttcgtagtcctcgaccgtggtgcgggccaggtccagggcttcgggcacgccgagcacgccttgtttgaagatgtcgtcgagccgggagggcgcgtcggcggactggatcttgtgcagcagtcggcaggcggcctcgctcaggcccattgcgctccagatgtgtgtgtggaacgcttcggcgctggggaatgtgaggcagtcggggtaggtggctttgagctgggccggcgtgaacggggcgtcacggtattggtccatgcgcctggggtccacgggcttgccccagaccacgtactgtcggcgcacgtcgccgcggccgtcgccgggcatcaggtagaggaatttggcgcaggaaagcacctggccggtggtctggttgcgataggtgtccacgatggcgccccacacgggttgcggtgcgccgttctcgtcgcggccgcgcaggtagagcggctcgtcgccggtttcggtgctgcccacgccgaccatgccgcgcaggtaggtgtagtcgctgcgttcggagcggccggagttcgaggccttgttgaacggcgtgccggttgggtacagcagggagatctgcgcgtcgaccagcgtggatttgccggattcgctggcgccggcgagcagggttaccggcagcttgtggtccgtggaggggcggaattcgtggtagccctcataggagccccagttgatgagtcggcgggattccagcatccaccggtccgcgatcatctgcacgtctgtcgcctgcatcattcggctcccttctcgtcgtcatcgtcatcttccgtgtcgccgtcgccgtgttccgcgacgtcgagccaggtgtcggccagttcgcggtcgagcaccacgggcacgagcggcgtgatctggtacatggcttcgtcgtccaggcgcaccaaatacccgtaggtgatcatcgcggagacgatggcgccgacctgctttgccacgccttcctcgtcgttgcgggcggccagatagccggcgccggtggcgagcgcggcgcggatctcctcaaagctgacgagccagtcggcggggtcggcgtgcacgttctcgtattcgaggacgcggatgcgcaggaaggcgagcagcgcggcctcctcgcgtttgaggctgacacgggttttgagcgagcgcagggtcacgtcgtcgccggccacgggcgtggcgtacatgatgcggtagcgttcgttgatcaccaagtcgagcaggtcgttgttcagggagcgtacgacggcgtcgcggttgtcgagcacggtgtcgtaggtgggcccgctgatatagcggtcgcgtttgagggcgatggcggccatgcgtgcctcggccggcatgtcgccggtgtcgccttcgaacagggcgtacgggttggcgttgtccatatgctcctcgtgttcctcgtgttcctcggccacggtcatccttcctccacaatgatgctcagctcgtccatgtcggccagcaccggtctagtgatccagttccggggctcgccgtcgatcgatacgcaatgccaggtcgcagtatcgccgcgctgcgccggggccggctcggtggcgatgtcgctgtcgaccccgacgccgacgccgtcagtggacggctcgtcggcgatggcgttgccgcttacggctcccagcccgcccaggaagccgacgatctcgctttcgcggcgttcgctttcgggcagccggttgaagctggcggcgatgtccacgagggttgcgccgggcctgtcatcggacctgtcaacggtcaccgggttgcgccggatgaggctgaccatgcgcaggagtcgggggccgccgctgttgaccatgtcccgcagatcggccaccggagtcgactgcggggcttcggcggcgaggtcgctcaggccgggtgcggtggcgcgggtcatggatttggccgggcgcatcggcaatggcgcgaacagcgcgtccgaggtggccgtgtcgtacgggcgcgaggcgtctcccatatgggttttcgcatccgcgttgaggcgcgcgtacagtcggttcaagcgggtgagcatcgtacggtagcgagtgtcggtttgctggcgcacgagccggctgatcgcctcgtcggagacgcgcatctggcggcgcacggcttcgatgccgtcgtagatgcgggccagttcgtcgcggatctggccgagcagcacgccggattcgccggccagatacggggttttggcgatggcgcgcagggcttcgtcgatttgctggcgaccctcgtcggtgatgatcacctggaaggcgtcctcgaagcggcggccgctgtctgattcgcggaacgagcggcggtattcatcgtggtagcgggtcaggttctcgtccacgctgatgtcgccggcctgcatgcgccggcgcaaggcgtcgccgttgtcccgctcgtcgagcacgagttcgcgcaggtcgatgggcacgccgcgcagcgtgttgtggatcacggcgatcacgtcctccacctgggcttcgctcagcgtggcatgctgcttgccctgttggatgcgtttgatctcgtgcttgcgttccttgatttcacggttgaggagtttgatgcgctcgccggggtcggcggtcagctgcatgcgcgcgtgctcgatttccatgatgatgctgttggcctgcgcgccggacagggcgcgtgattcgtcttcgagcctgctcagcgcctcgatggcgcggtgggcgcgggccgtcaaacggtagagaaatcggtgtgaggccgcatcatgcgagttggcgagccaggcgtagtcgccttcgccttcacgggtcaggtcggcgaggatctgatgggcggcctcggcgaaggtctggtcctcgcgcggcgcatactcgccggcgtcggccagactgctcagactttgcgcgaaccgctcctccacggtctcgcgcggcagctcgccggtgagcgggtcgaacgtggaacgcagcagcgacacgtacagcatcgcgttctggcgcaacagcaaccgcaggacgcccgtctcatacaccggtcgcagccgttccagctcccgcatcacatcggccacagcatgcctccctctgtcgtgaccgcaccatactagccgatagccgcgaaccacaccccgcccgcgccacgcccttcgcccccccacagggaggggcgccaagccatgctaaaaaatcacagacagactattgcctctgcgggaaatcatcgttagattggcgagaggaatattgtcaatgcatacgaaacggaaaacatcgtgaccgcaccgaacacgcccgccgaaacctctgaccagctcaacaagcccgccaaatccggcaaactggaggtctccgacctcatcaccatcggcgtgtttgcggccctgtacttcgtgatggtgtgcatcgccacactggtgagcaccctgttcaccggcggcttcggctccatcttcctgcccgccatcacggccctcatctccggctgcgtgtacatgctgctggccgcacgcctcggcaaattcggcggcatcaccgtcatgggcgtgatcatcggactattcctgttcatctccgggcatttcgtgctttcgttcatcgccagcatcgtgttcccggtggcggccgacctcatcgcgcgcgccggcaagtataagagcaaggcgctactgctcgtcagctacgtggtgttctcctacggcctgaccggcccgatcctgcccctatggttcatgaaggacgcctacgtggcgagcctgcaggcgcgcggcaaggacgcagcctacatcgacggcgtattcgccaacatcaacaccggcacgttcttcatctcgatgatcgcgattctggtgtgcgcggttctcggcggctggttcggccagcgcatgatgaagaagcacttcatcaaggccggtatcgcctgatgaatcctgcccgccggacgctcgatccgcgcgcgaaactctaccttctgctggtggcgaacctcatgctgttcttccatgtagggctcgccacgcaaatcgtcatggtcgtgctgttcctgctgcccctgctggcggccgcccgatggcgaaccgcgttgaacttcggcgtgacctatgccgtactcaccgcgctgggaatgctcgaccccgatgccctgggactgccgtggctgcatgtggtctccgcgctggccgtgggcgtcacgatgatgctgccctgtttcatcaccggcgcgtatacgttcaccaccacgtccgcgagcgcgttcatctgcgcgatgcggcgtatgcgcgtgcctgaggccgtggtgattccctgtgtggtggtcatccgcttcttcccgaccatcgccgaggattaccggcagattcgcaatgcgatggcgttgcgcggcatcgcctccggcggctgggggctggttcgtcacccggcccaatcgttggaatacattctgattccgctgctgatgaacgccaccaatgtggcacaggacctgtcggtggcggcactgaccaaggggctcgggcgtgagggcgagcacacctcgcgcacgctgatccgtatgaccgtggtcgactggctggtcatgattgtggtcactttgccgctcgcgctcgatatcgcgggggtgatctgatgggtggcaaccaatcgcagccgaatgcaactgccattattgggaccggcaagggtggcccactcgacacgtctgcgggaaccatcgcctcccgtggcatctcctttacctatgaccatgccgcagagccggcattgcgcgacatcacgttgaccgtgcccgcaggcgagtgcatcgtgctgtgcggggcgagcggctgcggcaaaaccagctatacgcgcgttgccaacgggctcatcccctcattcttccatggtgcgttcgccggcaaccagaccacgtgcgggctggatgtggagaccgtgccgatcgaccggctcaccccgctggtcggcagcgtgttccaaaacccgaaaacccagtatttcaacgcgaacgtcaccgacgagctcgccttcccggccgaaaacatagggctgccggccgaggacatcaatcaccgtatcacggccgtggctgagcgctttggcattgggcatctgctgcatcgcagcatcttccacctgtcgggcggccaaaagcagcgcatcgccgtggcggcggccaccatgctggagcccaggctcgtggtattggatgagccgaccagcaatctcgacgcgaacgccatcgcggacatgcgcgccatgatcgagcagatgaaggacgaagggctcaccatcgtaatcgccgaacaccgactcgcatggctcaacggcgtggccgaccggtacgtggtattcgacggcgggcatatcgtgcaggattacgaggccgatgaattcctgtccctctcccccggctgcgtggccgccatgggattgcgggcgttggacctgcaaccgtatcggcgccgaattgcggcgctggcttcaagcccggccgcggatgagtgcacttcagcattgctcggcacccataacctcaccatcggatacaaaggcaaggacggcttcacccgcgccatcccggacctgcggttccgtgccggcgaaatcaccgggctcatgggcaacaacggctgcggcaagaccacgctcgtgcgcacgttgaccggactcatcaagcctgtttcgggccgcatcgagctcaacggcgtgcccgcgaaaccgcgcgacctgacccgcgccggattcctagtcatgcaagatgtcaactaccaactgttctccgacagcgtacgcgaggaactgctcatcggactcgacgagacggatgccggcatcaccgctcaagccaatcaggtcatggccgatcttgaccttgcagcgttcgccgaacggcatccgatgagcctgtccggcgggcagaagcagcgggttgccatcggctcggcattgatgtgcggcaaggacctcatcatctttgacgagcccaccagcggactcgaccgctaccacatggagcaggtcggcgaactgctgcggcaactggcgagccaaggcaaggcgattctcgtggtcacccacgatgaggagctcgccgccggctggtgcgaccgcattgtcaatcttggcgccgacgattccgggaacaacggctcgcatgtcagtaacccagatgccagcagccccagccctaatgcctctaccaatttcgccaccacatccacccatgaaaggaacgcgcaatgaccgccagcaacaccacggattccacggccttcgacatcaccgactggctcggtgaatgggaaagcttcgagcatcacattgattcggatgacgccgccatccagcagacctgggaagccgccgagcaggcggtactcgccaacccgaagacggccccgatggccgcgcgcggcatcaggacgttctggtcgatggcctgctccaccaccagcccggagaacatcatccatatcggctactggcgtgtgaacgagccggccgccgaatccggctccacggacgatgccgcgctcgccatcgaatggttcgccgaggacgacaccagcctcgacacctacgaatacaccatcgaccatgtcatcgagcacggtctcgaaggctcccccaccttcgtgttccacaccaccgatccggccgccgaagacagcccgttccgctggctgcttgccatcaatccgctgccttcgcgcaaggcgttcgccgagggcgggctgctcagccacctgcatttccagtacgccaacgatctgcacacgctcgtcgccacggatgaggccaccggcaccgagaccttgcgcaatccgcgttggtacgccaccatgtgcgccaacgagggaaccgtcgaggaccgttgcgccatcatccgtgcgttgcaccacttgcagtagacctggcaacatacggcagtatggcggctccccgctagtgaaactagcatcgcttcagtagccgtgcgagtgcagatactcgtcatcgaagccgaaataatggccgatctcgtgcaacacggttttgcggatccgttggcgcagctcggcctgtgttgagcatacgcgttcatgcggccccttgaacagggtgatgacgtccggtatcacgccgctgtagcccgtagttcgcttcgtgatgggtatgccctcatacaatccgagcagttcaccgcacggactgctcattgtggccagttcgcgctcattgggttcgtccgcaacgacgatgccgacattctccagcacccgcgcaaaccgttcaggcaaatcatccaacacctgttcaattgcccgttcaaactcatcgtcactgatgtgcattcgctctccacacgcgaaatgccttggcaccaagtatgttccaaggcgctgaaatctcagactagcaggctcagctgttgcggttgatctcgatgtcggtgacggtgaggttggcctcgttgatcaggttgaagaggatgacttcggccagcggaccgggctgcatgaaggtgtgctgcttggcctcggagacgtagtcgcgactgtcacggtagaaagcggtatcaatgccgcccggatagacggcgaccaccttgacactggtgcccttgtatgcggcctgcagactcttggtatagcccttctcgccccacttggtggcgcagtacacgctttcgttcgcgttgccgcgcgtggcggccgtactcataatctgagcgattttcacattctgttcgccgcaggccttgagggtttccaccgtccacagaatcatgcctttgagtcccttgagacatttgtcgacgtcggcggcctcgtaggcggtgggcaccttgaacgaaggctggccggcgttgttgatgagcaaatcgatgtggccgagcgtggcgatatccgccacggattctttcacgaacgcttcgtcggtgatgtcgccgacgaaggcgcggtaggagtcatcgggccactgcgcggtcagttcggcttgacgttcggcattgaagtcgacgccggccaccagccagccgttggcgatgagctggctggcgagctcgtagcccaagcccagcgcgctgccggtgacgatggcgattttcttacctgttgtggttggcatggcagacctctcctactactattcttcggctacgagtttactactattcttcagctacgagttcgaggtacgaatcattccagaggtcttcgtcgccgtcgggcatgaggagcacgcgctcggggttgagcgcctcgacggcgccctcatcgtgggtgacgagcacgatggcgccctcatacttggcaatggccttcagaatctcctcacgggaagcggggtcgaggttgttggtgggctcgtcgagcagcagcacgttggctcgcgaggtgaccagcgtggccagagccagacgggtcttctcaccgccggaaagcacgtgagccggtttcatcgcgtcgtcaccggagaacaggaacgagccgagaatcgaacgggcctgcgtgttatcgagctcgggcgccacatgctgcaggttctccaacacggtggcgttcagatccaaggtgtcgtgctcctgcgcgaagtagccgatcttgcagccgtgaccgtattccacagaaccggtgtccggctcctcgatgtgggccagcaggcgcagcgtggtggtcttgccggcaccgttgtagccgaggatcaccacacgcgagcccttgtcgatggccagattcacgccggcgaacacgatgttggaaccgtaggccttggaaatatccttggccatgatcggcgtgcggccgcagggcgcgggctcggggaaacggatgtccgccaccttctcggccttctgcgcctcggaggtgttttccagcagcttttcggcacggcgcatcatgttctgcgccgccacggccttggtggccttggcgtgcagtcgaatgccttgcttcatgagacggtcggccttcttctcggccacttcgcgttcgcggcggcggcgctcctcgtccaccacgcgctggtgcaggtaggccttccagccaagcgaatacatgtcgatctggccgagctgcgcgtccagatgccagaccttgttcaccacttcgtccagcagttcggtggagtgggaaatgaccaggaagccgccctcgtacttcttcaagtagccgcgcagccattcgatagaatcggcatccaagtggttggtcggctcgtcgaggatcagagtgtcggcattggagaacaggatgcgcgccagctcgatgcggcggcgctggccaccggagagcgtgccgagctgctgctccatgacctcctgcggcaggccgagcgaggcggccatggagatcgcctcggactgggccgcgtagccgccggccttgtcgaagtcctgcatggccttgtcgtaccgggtcatggccttgctcatcacgtccggatccgggtcggtcatatccttttcggccttgcggatgcggttgatgatggttgcgatgtcgcgcgcgctcatcatgcggtcgagcgcggtctgcgtgggatcggaggcgtgcgtgtcctgcggcaggtagccgagcttgccggagacgcgcaccttgccggcggtgggcagcatgtcgccggtgatcacgcgggtcagcgtggtcttgccggcgccgttgcggcccaccagaccgatcttgtctcccttggccacatggaagttggtggggtgaagcagcgtgcgcgcgccgatctgaatttcaagtccctgcacctcaatagccatgaataacctacttgcctgttacgaatactgtctcttaccaaagtccgactgtccatcatagcgaacaccatgccgaccgggctcagccgacgctcatgcgtccatacgcagccgcgcaactgatcggcaaggtgaagaatgcgacgcccggtatggtgatcgcgaccatggcgcacggtatcgaagctgccatcgaagccgctgtgagcaccgaaaccgacgccaccgacatcatgggcgaaacccactaacgtacagacagcgatgcccccgccgacaacttctgtcagcgggggcatcgctatgcgttgaacgttacagttcgcgcaactgggcggcgatctggatggactcgacgctggcctcggccttgttgcgcgtctcctgccattcggtggcgggcacggagtcgagcacaatgccggcaccggcctgcacgctcgcctcatggtcgcgcaggaacgcggtgcggatggcgatggccatgtccatgttgccggagaaatcgaagtagccgacggtgccgccgtagatgccgcggtcggccggttccaactcgtcgatgatttcgactgcgcgcggcttaggcgcgccagacagcgtgccggccgggaacgcggacttgaacacatcgaatgcggtcagcgaggggtcgaccttgccggtgaccgtcgagcagatgtgcatgatgtggctgaaacgcttgatgtccatgagctgcacgacttccacggactgcggcacgcacaccttactcaggtcgttgcgagacaggtcgacgagcatgatgtgctcgctgcattccttcggatcggcaagcagctccttggcgaatttctcgtcttcctcaggggtggcgccgcgagggcgggatccagcaatcgggaaggtcatcgcgtggccgttgtccaccttgatgagggtttccgggctggagccgatcacgttgaagtcgcggccctgagcgtcggtcaacgccatgaaatacatgtacgggctcgggttcagcgtgcgcaacacacggtacacgtcgaacgggtcagcaggcgaatcgatgtcgaggcgctgggagatgaccacctggaacacgtcgccgtcgacgatgtgctgcttggcgcgttcgacggcctgctcgtagtggctcttctcggtgcggaagcgcagctcgggttgggcgaccgtttcgtccaggatgttgacgcgggactcgtccgaagccggggtggcggcatcgcgctgcatctggtcgagtcgagcgacggcctcgttgtaggcagcgtcggcgcgagtggatttatcatccacattcaccgcattggcaatgagccataccgaaccggatacgtggtcgaccacggcgatatcggtggccagggcaagcacggtctcaggctggccggtctcgtccggagcttcggcgcgcagggtcggttcccagtggcggatggcatcccagccgaccgtgccgaccagaccgctggtcaggttcggcaggccttccacatgcggggccttcagagtcttcaacgtggcgtgagcgacttcgactacgtcaccggtgacgggcacgccgaccgggaccttgcccagccagtcggcctgaccgttgttggagcgcagctgggccatcgagttgacgccgataaaactgtaacggctccacgtgccgccgtattccgccgattcgaggatgaaggtgccggatcggccgccggcgagacgctcatagaagccgaccggggtgagcgagtcggcgagcagacggcgcacaatcggaatcacacggtatccggcgtcggccagttcgtggaactgttcgcgactgggccaggtggcgccccacttcaggtgtttgacgctgcattcgctcatattcgctcctttgcttacaactcgatgtcttgtttcatagtacgcggtcgctcggcttccctcagtcaggaaagcccgttctactgctcggccgggcgatggccttcgaccacgggcagggggccgccttcgaggaagcagctgcgcttgccggtgtggcaggcggcaccgacttggtcgacttcgacgagcagtgcgtcgccgtcgcaatccagggacacgcccttgacgtattgcacatggccggaggtatcacccttgcgccagtattcctgacgggaccgggaccagaaggtcacgcggccggtggtcagcgtgcggcgtaatgcctcgtcgttcatgtagccgaccatcagcacctcgcgtgtgtcgtactgctggatgacggcggcgaccagacccttggcgtcacgcttcaggcgtgaggcaatacggggatcgagttcagtggaattgtcgtatgtagtgtctgtcatacctatcttctttttgtggaccaccctcagtcagcttcgctgacagctcccggattatgtgcgacgtgcgcatagcgcattgccacgaacaattcactggattgttcgcccagcgggagcaaggtgtattcgtttagcgaacggtgtagccgtgcttcttgagttccgccttgacatcggcgatagtcaggatgccgtaatggaatacggatgcagccagcaccgcgtcggcacctgcttcgatggcgggcgggaagtcctcgaccttgccggcaccgccggaggcgatgatcggaatcttgacttccttgcgcacggcgcgaatcatctcgaggtcaaagccttccttggtgccgtcggcgtccatcgagttaagcagaatctcgccggcgccaagctgctcggcgcgcttgacccaccagatggcatcaataccggtggatttgcggccgcccatcgtggtgacctcaaaaccggactgcgtatgctgctcacccttttcgcggcgggcatccacggagagcaccagcacctggttgccgaaacgatcggccacacggctgataagcgacgggtcgttgatggccgccgtgttgacaccgaccttgtctgcaccgcagcgcagcagtgagtcgacgtcctcgggcgtgcgtacgccgccgcccacagtcattgggatgaacacctgttcggcggtgcaggagaccacgtcaatcatcgtgttgcggtgggagctggatgcggtcacatccaggaaggtgatctcgtcggctccctgacggtagtattcggccgccagctccaccgggtcacccgcgtccttgaggttctcgaaatgcacacccttcaccacgcgaccggcgtcaacgtccaggcacgggatgactcgtaccgccaacgacatgcttcactcccctgttcggctttgcattacagtccttcagactacctaccgcccgttacatgcgccgcacctgtttctggaatatgagaatcatcatattgagcaccggcatggcagccgctcggcgtgagagaatggctcgtggaagttgtccgccgaatcaaggagattggcatggctgtcgaaaacagcacggtactgatcatcgtcaacaactggggtatcgaggagaccgagctgacgcgcccgctgcgcgatctcaaggccgccggcgccaaggtgacgcttgccgccactaccttggacccgtgtgagacggtgcagcacgaccgctacgaaggtgaaacgctgaccccggacgcgcgcctgtccgacgtgcaggctgccgactacgacctgctggtggtgcccggcggcacctgcaatgtggatcgtatccgcgtcaatgaggatgcgatcacgctggcgcaggagttcgcgcacgaaggcaagccgatcgccgcgatctgccatggcgcgtggctgctggtcaacgcgggtctggtggctggcaagaccgccgcgccctgccgctatatcgccgctgatatcgagaacgcgggcggccattacgtcgacgagcagctgcacgtggacgacgccaacggcttcaagctcatcacgtcccgcaagcccgacgatctggactacttcgtggacgcaatcaaggatgcgctgaagtgaccgaatcggcctacggccgatagatttttcgtggctgcgcaacaacacagcatcggccgcaggccgattcaatcaccgaagctaccgctccttggcggccaactgcccgcaggcgccgtcaatatcctgaccgcgggtgtcacgcagtgtggcggtgatgcccgagcggtgcaggatctccaggaaccgctgttcgtcttccggcttggaggcggtccacttcgagccctcgatggggttgagcggaatcgggttgacgtgggcccagttgtcgccgtaatggttaagcctcttggccagcaactgcgcatgctcggcctggtcgttgatgccgcgcatcaacgcgtattcgatactgacgcggcgcttggaggccagccaataatcgtgcgcggcatccaacacctgcttggtattgaaacgcttgttcatcggcaccagctcgtcacgcagttcgtcgctgggggcatgcagggaaacggccagacgcacgggaatgccttcggcagtgagcttcttgatgccagggaccacgcccaccgtggatacggtgatgttgcgcgcggaaatgccgaagccttcgggaggcatggcggaaatctgtcgtacggcggacagcacggagttgtagttgcccatcggctcgcccatgcccatgaacacgatgttgctcaggcggccctctcccccggccacttcgccgtcgcgcatcatcttggcggccacacgcacctgttcgattatttcaccggtggacatgttacgggtcaggccaagcttgccggtggcgcagaacgggcagcccatgccgcagccgacctgcgaggagatgcacagcgtggtgcgggtcgggtatcgcataagcaccgattcgatgagggagccgtcgaacagcttccacaaggtcttgatggtggtgccttcgtccgccacttggcgggtcacctcggtgatgagctgcgggaaaaacgcggcggcggcctcgctgcgcttggctgccggaaaatcagtgaattcggcggcattcacatcgaaatggccaaagtaatggttggcgagctgcttgactcggaacttcggcaatccgagttcggccgctttctcgacgcgctgctcgggcgtcatatccacaaagtgcagcggcggcttaccacggcgggcatggtccttggatagcacgtcacggaaggcacctgatgtgccgccgggagtaatgccggtttccggagtgtcaggatgctgtgtggtcatgatgggttcgcttcgctctcaatatcagaaaatagtcaaacatgcaatagaaatatcagaatccaccatacggcgtgccgcatacgaatcagatggcccatgtcttaacccatagcgaacgcatattgaacgatgatttccccatatatggcatgtggcaccgtgcgatatacacacgatgccacattgttcgtgcacgaggcatgcgaatcacagtccggtgatccacagcaaggcgcaggtgaacggtgcactcatcaaaatggaatccacacgatccatcacaccgccgtgccccttgagcagatggcccatgtctttgataccgatatcacgcttgagcatggaagcacacaaatcaccgaacgtgcccacggcaccgatgagaatacccgccacgatcggcacccaccaacgagtggcccatttcgaggcatcatacgtgcatgcgaatacggcaaatgcgccagccatggcgaagagcatcgagccgataaggccctcaacggacttcttcggcgagatgcgcgggctgagcttgtgtttgccgagccaggcaccggcaaacaaaccgcccgtatcggatagggcgggaaggaacaccagcatgatggcgtgtgcaatcggatgcccattaaaagtcagtgagatgatgacgcagctggccaacaacggaatgtacaacacggtaagcacggacacagccacatggctgagccgggaatgatgctgttccccgccctcatgattaaacgaggattcgaggcgcgcgctggcatccgtgttggacagtttgccggcaaccgccagagatagacggttgccgacgctgatttttgcgctggccgcgatggcgatcagaataatcgacacgatgatactcagcgacatcgtgatgagatggtacggggaatagtaggtggcaatgagggtgaaggacgagcacagccacagcataaacaccgggaggtgcaggcctacggtggcgaagtccaccctgagctcccacagcgccagaatcatgaacacgactaccagcagcacgaagaggtcgacgctgagcagcaggcacgcgacaataaggatgaccagtgccgcgcctgtggcgatggcctgcggcatgttgcggccggtcttcttgttgatctggtcgagcgtctcctcggcctcttcatggggttgttcgttgcgttccataattctccggacctggtctgaatcagacctccatgatctccttctgcttggtctccagcagagtatcgatctcgtcggtaacggacttggtgaccttgtcaagatccttcagcaggcgatcgccttcgtcctcacccatctcgccgtccttgacggccttgtcgatggtttccttggtcttacggcgaatgttgcgcacggcgaccttgccatcctcggccttgcccttggcgagcttgacgtattccttacgacgatcctcggtgagttccggcatggtcagacggatgacgttgccatcacggttcgggctgatgccgagatcggagttgcgcagggccttttcgacggcaccggcctgggaagcgtcaaacggggtgacggacagggtgcgcggttcgggaacgccgatggaggcgacggccttaatcggggtgggggcaccatagtagtccacggtgatgccgttgagcagggccgggtttgcgcgaccggtgcggatgccggagaagttttccttggtgttttccacggtcttggccatctgttccttggcctggtcgataagagacatattcactccttgtgtgttggtgttcgtcagtgttgttcgtctatgaacgcttgattcgattgtgggcgtttgcggcttactcggccacgcgcgattcggcggtggagaccagcgtgccgatttcatcgccgacgagggcgcgggtcacgttgcccggctcttcgaggccgaagacgcggatgcgcttcttgttgtcgcgggccatggacagtgcggaggcgtccatgacggccagattgtccacgagggcgcgattgtagctcagggtttcaaaacgcttggcgttctcgtccttgcgcgggtcggcggtgtagacgccgtcgacgccgttcttacccataagtacctcgtcgcagtggatttcgagggaacgctggatggaaaccgtgtcggtggagaagtacggcatgccggcaccggcgccgaaaatcaccacgcgacccttttcaaggtgacggatggccttgagcggaatatacggctcggcgacctgtcccatggtgatggcggtctgcacgcgggtggcctgcccctcctgctccagaaagtcctgtagagcgaggcagttcatcaccgtgccgagcatacccatgtagtcgccacgggaacgatcgataccggcctgctgcagttcggcaccgcggaagaagttgccgccgccgaccacgatggccacctgcacaccctgttgtacggccggaacgatctcctcggcaatgcgacgaatcacctgggtatcgatgccgaccttgccaccaccgaatgcttcgccggaaagcttgagcagaactctgcgcggattgtcgctatcagtcatattgtgcctttctcaaaaccgaaagtgcgaaattatccgtagacaagcgtatcggtttacgacgacaccccctagcaacgacacccttggaatagcgaaacgccatccgattattgaataaccggatggcgtttcgttgaaattacgctaagcgcgtggagtaagccttaggttcactcctcttcgcccttgccgacctcgacacgagcgaatgcggtggcgttgccaccgacttccttgaacaggtcgccgacggtcttggacgggtccttgacgaacggctgctcaagcagcacgacttccttgaagaaagcgttgagacggccttcgacgatcttcggaacgatcttctccggcttgccctcggccagggacttctcggtggccacgcgacgctcggactcgaccacatcggccggaacgtcctcgcgggtcagccatttggcgcccatggcggagatctgcagagcagcttcgtgagccacggcggcgccggccttgtcggtggcgatcatggcgacgatgctcggcggcatctcggcggacttcttgtgagcgtagacttcgacgtgctcgccggagatcttggcgaactggccgaccttgacgtgctcaccgaacagggcggcggcctcttcgacagccagcttgacggtggtgtcgccagccttggcctcgagcagctcgtcagcggagttggcgtcggcgtccacggcgtagccgagaacttcctcggtgaactcgacgaacttcggggtcttggccacgaagtcggtctcggagttcagctcgacggcgtagccggtctcgccattggcggtctcgacgaccttggaggcgatggtgccttcctgagccttgcggccttcacgcttgccggctgcggcgatacccttggcgcggatgatttccttggcgcgggcgacgtcgccttcggcttcggtcagagccttcttgacgtcgagcatgccggcgccggtgtcttcacgaacctgcttgatcagtgcggcggtaattgctgccattgattattctccttgagaaattttgcttacccgtgaacgatgggaagcgcttattcaggcacttcccatcgtagagcatcactcggccttgggggcctcggcggtttcgccctcggcggcagccggagcggcggcttcagcggaagcctcggcaggagcctcgttggtcaggagttccttctcccaagcggccatcggctgctcggcggcttcgccctcggccttgttggcgccggagcgctccagcagaccttcggcgacggcgtcagccatcaggctggtcagcagttcgatgccgcggatggcgtcatcgttggccgggatcgggtactcaacggtgtccgggtcggcgttggtgtcgacgatggcgacaaccgggatacccagcttgtgagcttcctcaacagccagggcttccttggtgatgtcgacgacgaacatcgcggacggggtgcggttcatgttgcggataccgcccagctgcttgttgagcttgtccttctcgcgctcgagcaggaggagctccttcttggtcaggccggagccgtgcacgtcggtgaagtccatttcctcaagttccttgaggcggttgacgcgcttggagacggtctggaagttggtcagcatgccgccgagccaacgctcggagacgtagggcatgttcacgcgggtggcctggttggcgatagcttcctgagcctgcttcttggtgccgacgaagagcacggtgccgttgtgggccacggtggtcttgatgaagtcgtacgccttgtcgatcatgtcgagcgacttgaacaggttgatgatgtggatgccgttgcgctgggtgaggatgaactgcttcatcttcgggttccaacgacgggtctggtggccgaagtgcaggccagccttcagcatatcgctcatagtgatctgagccatggtattactacctttcattgtcggttcttgcctggccatgcgcacctgcgtgcagctgctcccccggtttcacgagttgtgcagccgaccgacacaagccgtcgcgagcatgacgcgaatttgttgtgtgccggttgacaatattgggtggctctggacaccagcgactgcgtccgttgccgggtggcacacgagtttcgagaatagcacggagccggtactaaaaaaaacaggctcccctctctgaggggagctgtcgccgtaggcgactgaggggagtcacggacggtaccggcagaaccaccctcagtctcactacgttcgacggctccagccagtgggagccgagtatggactacttcgcctgacgattgcgcatgtagcgcagggcttcgcggcgttcttccttttccaggcgatccaaatacacgtggccatcgaggtggtcgcattcgtgctgaagcatacggcccatcagcccggagccctcgagcacgacctcgttgccgtccaagtcgatgccacgcacgcgagcgtagtcggcacgacgggtcttgtaccacaagccgggcacggacagacaaccttcatcgccatactgctcgccggacttctcctcgagtacggggttcagaacgtagccgaccttgccgtcgatgttgtaggagaaggccctcaggctcacgccgatctggttggcggacaggcccgctcggcccggatcgtccacggtttccaacaggtcgtcaaccaggcggcgcacggccggggtgatttccttgatctcatcgcagggggtgcgcaggactgggtcgggcacgaccctgatctcacggatggccacttctcgttactcctcattcttctcgtcagccggctggtccggcttgctgccggtgtcagcggcattgtcggcattgtcggcattgtcagcggaatcgccggtctcgccctcttcgggttcggccttcgacttcttgatcttctccgacacgctagcaatcgaatcagacacgctggttttcatctgttccgaggcctgtttgacctgttcggacgcctgcttgaccgattcggaggatttcttgacggtctccagcgtgctgtcgatgatcttggcagtggcgggcagcggcttgttggatggcttgggcgcgtacagatcctcctcgatgacggtggcgtagcgctgcaataccttgggacgcaccactttcatgctcggggtgagtgtgccgtgctcctgactgaattcctcatccagcaccgcgaatttgcgcacggactcagcgcgggagacattggcgttggcctggtcgatgtactgctggataaaggcgcgcaccgcgtcgttgtcgctggcctcggcgagtgtcatgtcggcattgaggccctgaccttccagccaggaatgcagcatttcggggtcgagctcgataagtgcggacacgaacggcttgccgtcgccgactactactgcatgagccacgatcgggcaggtgtcgatgacatcctccatcggggcggggctgatgttcttgccgccggcggtgatgatgatgtccttcttgcgtccggtaatgaaggtgaagccgcggtcgtcgatacgacccagatcgccggttttgatccagccgtcggcagtcatcgtctgtgcggtgagttcgggctgcttgtagtagccaaggaacacgttcgggccggtcagctcaatttcatcgtcttcgccaagacgcacgcccatgccaggcccaggcttgccgaccgaaccgatctcgttgtcgtcctcccaattgacgagcatcggagcggcggtttcggtcatgccataaccctggatgaaggtgatgtcattcatgccgttgaaaaagtgggccaaatccacgttgagcggcgcaccaccgcaggccagccatttgaggttcggtccgagagcggaacgaatggatttgcccaccgtggccatgtagaacgaatggcgcatgcgctcgatgaacgaatggccgcgaccggcctgctcatccttgctccacttgacgaagtgcttgaccgactgggcgaagatatgcccctggatgccggcaccagccttctgcgaggccgcgttatacaccttctcgaacacacgtggcacgcccagcaggtaggtgggcttgaagctgcggatatcggcgagcagtcgcttggcgtcgggaatgtatccgaccacgccgcagccaccgatgcacacgtactggatgtagcgggcgaagcagtgcgccagcggcaggaacagcagcagacggttgtcgtcgtacagcatgccacgcagaatctcgtagccgttaagcacgatgtgcgtgtaattgcggttggagagcatcgcgcccttgggcttgccggtggaaccggaggtgtagaccacggtgagcagatcatcggctttgatacgagcgatagccgcatccaacgtctcatcggatacgccatgcccgaagtcaacgacagcgtcaaggccatcggccttgaaattgaacacgtatttcatgcccggatgattgacacggatctgctcaagcgtctgtgcgcgctggaagtcgccggcaaaggcgatggcgggatcgacttcctcgacgatgcccgcggtctgacgggcggaatcggtctcatagacgggcacaaccacagcgccgattgccgcgcaagcgaaatcagccacaccccactcatagcaggtaggcgagtaaatcagcaccatggtgccggctttgacgccaagtcccaacaggcccttggccacctcgcgtacgcgggacagcatttcagtagctgtggcgctgcgccattggtgggtgttgtcatcctgccattccgcgatgatgtcatccggcgtgcgagctgctcgtttggacagcagcgagtagacggtgtcgtcatcggtggtgacatatctgggttcttctacatgttcacgcatggtcactactataggcgaaccagcctatgacacggcagaaccgtcttccgctaccagcgtaggaatcggtgtgcgggcggggccgtctggtcagcccaaatcggcatagatgcacatccatcgagaaccgatgtacttcagtttgaggttgactcgcagattttcctggccgatggtcatgaataccgccatttccagcgtgtccttgccggtgatcatgccgtcgatcaatgtggggacagtgggcagatagcagaatttcgctttgagctccggatgagtgaccatgtggatgccgagcaggtattgcatggtttgcagccggtccaggcatggttttgtcatggctctgttgagatgtgcgacgctgagtttgccacgtatcgcgtccgccgatgtgcaggcgatgcggcatgcagccatggccatggaatgacattccttcgcattcagcccgcctatgaatgtgggttggatgtgataccgcaccgggcgatccgacagctccacaacgatgaatccgtcataactcggcaacggcccgtactgatatgtgccgtggaaaaatcccgaatactccatgatgacccccttcaagcccccttgcaactcaccatcatcggcgagcgtctgtactacaacatcacgaaaggcgcgccaagtcaaactacttgagcgcgccttcgggcaagttaagcctcctgcatggagggcaaacccccattttcagggggcaatcgggattatcgtgcggaatacgggttgaccaccatgccgcaacgctggaagttcttcacgtcgacgtagccggtggaggccatcgcgcgcttgagggcgccgatgaagttggtcttgccgtccgcctggtggctcggtccgaacagcacctgttcgagcgggccgaccgtgccgaccgtggtgcggtagccacgcggcagcgtctggtggcgggcttcagaaccccagtgggtgcccttgccgggggcctcggtggcgcgggccagcggcgcgccgagcatgaccgcgtcggcgccgagggccagggccttgacgaagctgccggagtcgcccatgccgccgtcggcgatgacctgcacgtagcggccgccggattcgtccatgtagtcgcggcgggcctcggccacgtcggcgatggcggtggccatcggggcctgcacgccgatggtctggcgggtggcggagaccgcgccgccgccgaagccgacgagcacgccggccgcgccggtgcgcatcaggtgcagggcagcggtgtagttggatgcgccgccgacgatgacaggcacgtcaaggtcgtagatgaacttcttgaggttcagcggttcctggccggaggagacgtgctcggcggagaccacagtgccgcggatcacgaacaggtccacgcccgcgtccaccacggtggagtagaactgctgggtgcgctgcggggagagcgcgccggccacggtgacaccggcggcgcgaatctcgtgcagacgttgcgtgatgagctccggcttgaccggctcggcatagatttgctggatacgctcggtggcctgatcggccggcagtccggcgatttcgtccaacagcggggtcggatcctcgtaacgggtccacagaccttccagatcgagcacgccgagcgcacccatcttgcccatggcgatggcggtggccgggctggtcaccgaatccatgggggcgccgatcaccggcacatcgaactcataggcgtcgatctgccaagaggtggagacgtcctcggggtcgcgggtgcgacgggaggggacgattgccacatcgtcgagtgcgtagccgagacggccttttttgcccaaaccgatttcaatttcctgagacatggtttccagcctattgcccgggtgggacgccaacaaggccgtttcccacggaccggacgattgcttcaagtcgttacaaacatgcgctatgactaaatcatcttcacaccatctatcaggaggaagcatggccaaaatcaaggtcgaaggcactgtcgtcgaactcgacggcgacgagatgacccgcgtgatctggaaggacatcaaggatcgtctgatcctgccgtacctcgacgtgaacctcgactactacgatctgggcatcgagcaccgcgacgagaccgatgaccaggtgaccatcgacgccgcccacgccatccagaagcaccatgtcggtgtcaagtgcgccaccatcacccccgatgaggcccgagtcaaggaattcggtctcaagaagatgtggaagtcccccaacggcaccatccgcaacatcctgggcggcacgatcttccgcgagccgattgtgatgagcaacgtgcctcgtctggtgcccggctggaccaagccgatcgtcgtagcccgtcacgcattcggcgaccagtacaaggccaccgatttcaaggttccgggagccggccagctgaccgtcaccttcactccggacgatggctccgagccgattcagcacgtggtctacaactacggcgaagacggcggcgtggcccaggtgcagtacaacgtcaacgattcgatccgcggtttcgctcgcgcctgcttcaactacggcctgatgcgtcattacccggtgtacttgtccaccaagaacacgattttgaaggcctacgacggccagttcaaggacatctttgccgaggtgttcgagaccgaatacaaggacaggtacgccgaggccggcctgacttacgagcaccgcctgatcgacgacatggtggccagctccctgaagtggcacggcggttacatctgggcctgcaagaactacgatggcgatgtgcagtccgactccgtggcccagggcttcggttcgctgggcctcatgacctccgtgctcatgaccccggacggccagaccgtcgaggccgaagcggcgcacggcaccgtgacccgtcactaccgccgctggcagaagggcgagaagacctccaccaacccaatcgcatccatcttcgcgtggaccggcggccttaagcaccgcgccgatctggacggcacgcccgaagtccgtcacttcgccaagacgctggagaaggtcatcgtcgacaccgttgaaggcggtcagatgaccaaggatctggccatgctcatcggcccggacgaaccgtggctcgacaccgacggcttcatgaacgcgctggacgagaacctggccaaggctctggccgagtaaatcatcgaacacatcgtgcggacctacatgggtcatgtcatgtcgcaaactgtcatgattgtcgtgcttcatctggaatgttcctcagcacgataatcatgacagttgttcgatgcacgcacgtaatacctctaattgttcccggatatgtggcgatttgtccactggtccgggactttttcgtatacggcctactagaatcgtgattcagcttgttttcacgcccgcttgaggaggtttcgccgcttatggtgttcgcacgccgctcaaccaccctgctcgccgccattatcgcatcctgcgcgatggtgctgtcactgaccgcgtgcacctcagacaataagaccgttgtagatggtcaaaccacggtgacgtccaattctgccggcggcgtggccgtgttcacaccttcggacggcattacgctgaaccagcagacgccactgaacaaatgggcgaagctggtgcctgacctagccaaggctctggccgacgccggtttcaagaaaggcgatatcgatcatacgacgtccgactcgttggccaagcaaagccgcgccatccaagactttgtggtcgatcatctttcgaataacaccacggacgattccggcattgccatcgcgcccgacaacatgacattgctcgtggctccagtagtcgaggccgacgcttccactcgccaatacggcgattacatcagccagaacctgagcaccaacgatgccacggatggggaagctacttctgacggtgaatcttccgaagacgactcgtccaaagacgattcgtccaacactgagagcgacagcactgcatcggacgagcaggcgcaggccgtggaccggctggtctcatcgctcaagctggccaaggaatccggcatgcatgtggtattgctcggcaacagtatcgagggatataagccggacgccttcgtcaagttctcggacgcccagaccatcggcaagctacaggcggaaaagatggtgtccaaactcaagttggataaggccagtaaagacaaccccaaatacattgaggtgctgctgccatacaccgccgtggacgaaaaaggcaacgccaacgattccacgttcgcccaagaggcgttccgtggtatctggcaggtactgggctcctactatcagaagggcgttgtggaaagcccttcaggcaccttggacggcaaatccacggaaaacgattggcaagccgtggcctacgatgccgctaaggaaggctccactgcgaaagtgcttgacaagcgtctggcaaaaaccgacggacagtccacactcacccgtattgacggcatcatcacgatgaacgactacatcgcctccgaggtcgtcaaggaattggacgatctgggatacaccggctctgccgccgatatcaatccgcagatcaccatctcgggcattgtcggcaatatcaccggcaagaaggatctcagccgcgacgccgtgccggacccgatcaaatcccctgaaaacgacaacgcaaacgactcatccagttccgatgacgatgcggacgaggacacctccgcttccgacaaggaccgtgactcgcagtggcctctagtaaccggatacggcgcgtatgtctcgaacatcccatccatcgtcaatggcaagcaatggatgaccggcatggaagacagacagaccatcgccacggatatcgctcaggcctgcgccaagctcaacaaggacgaagcgctgaattccatgccttcaatcaggaactccgaggtaggcggcgtgaagaagatcccgaccatcagcgaaccgttgctggctgtcagcgccagcaatctcaagtccgcgctgatcgaccccggatatatttccttggccgatgccggtctgtgattcatactcgtcacgccgctagccgcctgcgatgtctcttccgtacggccctgttccggccgacaatcaccgttaaatcatgacggtttcagtacgatttttcgactccccgcatattgctgtggatcaagataatcggccgttcctcgcttgaggccccaatgcaggcaacggtcttcgcaatggtccgagctgccttcaacgatgcctacgggctgtctgcgggagatcgtatcccccactgagagctcggtaacggccggttcgaatgtcgacgtgacacctccacgatgccgtacactcaccacatctttgccagctactttgccagcaaaactcacggtccctgcctgtggtgacagaattacggtaccttgctccgcaacaagatccactccacgatgacctggtgcccacgggttgatcggccgctcgaactgttgttcgacctgtggatcgtcgaccggccagtcgaatcgggattcgcactgattgccattgcgccacgccaaatcagacatatcggtgaaatcctccaccgtgtatgccgcatctccggtcaccgcagtatccgcatgcgcaacatgctgaggcgtggatgccagccctactcccaaggcaagcagcaggccgataacggcggccaacgcgattatggcatccatacgccgttgccgttcctgagcccgctgacgcgcctgctgacgccgccggctggcacgtcgggcttcgtcgcgacgccaatcaaacaacagtggtgcattcatgagattcctccccatagtgtgagtgtgatgtgattccggcttctttgccggtgatacccaccttgaggggtccgaaacaggatgtccagccaaaacgacctatgtggttctagcttccgaagttatccacaatgaaatttcgcgtgacagtatcgccgcatcgtcatgttgttcgaccttcagccgcggccgatccatgtcacaaccgctgccatgcagtgacagcggaacatcagaactcttgtgattgttcccactgggttcgcatactcagacggttgttccgtttcaccgattccagtatttgccaagcagacaccagctcctctaccgttagtcgctagtgtatatccgcgttcggtttttggctgtatgagatagtatccgatgagtccgattctgcggaattcagcgcgacatgccctacacgcatgtaatttgctttttcgtggcaggcatgtaagatatgtgacttgtgcgcgagagaaatctcaaacacagcagacattcctgcgtagctcagttggcagagcatccgactgttaatcggacggtcgctggttcaagcccagccgcaggagctcacctgaacgggtaactccggacgggatgaaaattgaatattcctgcgtagctcagttggcagagcatccgactgttaatcggacggtcactggttcaagcccagtcgcaggagctcacctgaacgggtaactccggtcgggatgaaaattgaatattcctgcgtagctcagttggcagagcatccgactgttaatcggacggtcactggttcaagcccagtcgcaggagccatcgaaagcctcggttctccgaggcttttttattttcatcgtattggtggccagacacgacaccccatcatcaaccgggaaatccatggcgaagacctcaccactactcacatcaggcagacaggtcactgtcaattcaccgatgagaggcacggtattcccagtatcagtttgggaataccgcgcaaatcttacatcgagaccttggtcaggggcatggcggagtcaatcgggaagtcgggggcgctgggggccacgccggcttcgaccaggttcacgccgagcatggcgaccatggcaccgttgtcggtgcagagcttgatttgcgggatacggacgtcgacgccgtagttctcgccgaattcgagcagtttggcgcgcagctgcgagttggcggagaagccgccgcccacgatcagcgtgttggaatcgtactgccggcagccgcgcatggccttacgggccagcacggtggccacggaatcggccagggatgcgcacacgtcgtccaccggaatctcatggccggcggcctgctcgctttccacccaacgggccacggcggtcttgacaccggagaaactgaaatcatacgggtgcgcggcaccggccttgccttgggtcagacccatcggcaccttgatggcgtgcgggtcgccgttctgaccatggcggtcgatgtgcgggccgcccggatacgggaagccgagcaggcgggcgaccttgtcgaagcactcccccgccgcgtcatccagcgtggtgcccaccacatcgattttgcgcggcatgtcttccacgtgcagcagcgaggtgtggccgccggagacgatcagagccagcgtgtccttggggaacgggccgaactgcagctgagtgacggcgatgtgcccgatcacatggttgatgccgtaaatcggcttgttcgcagcccaggccagcgccttggcgccggacacgcccacggccaggcaaccggccagtccgggaccggcggacacggcgatggcgtccacatccgccaacgtcatgttcgcgtcgacgagcgccttggacacgcatggcacgaaggcctcggcgtgcgcgcgggaggcgatttcggggatcacgccgccgtatcgcgcgtgttcctccatggatgaggccacgacgttggagagcagttcgcggccgcgtacgatggcggctgcggtttcgtcgcaggtggattcaatacccagtacaaccggttcgctcatcgtgcttctccgttcttctccgtttgcttgctggtgatgtcttcaatgtccgccgatgccgtctgcggggcggcaaagcccacgaccctaggtttcaggtccaagctcatggtgtatgcgtcgatgccttcgggctggtagtagcgtttgcgcaatcccatgcgttcgaatccgaaccgctgatacagggccagcgcagggtcgttatccacacgcacttcgagcagcatgcgcgaggcgccctgacgtttcgcctcgtcgaccagtacctgaagcaacgcagcggcgatgccttgccgctggtatgccttgcccacgccgatggtcatgagctcggcgtcctcgccgtcgtaccagaagccggcgtagccgcggacaacagcctgttccgcctctcccagcacatccagcagatacgtgcgggccggtgcgtccagttcctctcgcaccatgttcgcattccatgcgccgcggccgaacagttcgccttccaactgtgcgatggaacgaaccgcaagatcacgacttacggcagtgatgtcaacaatcatcggaccacaacccacttcacgccttatcggcaccggcatggccgagcacgtgcttcagtgggttcggtacttcggcgtccggccggcgcaggtacaacggttcgatcggcacgacctggtcgccgcgcagttcgcggctcaacgcggtggtcgcaaagacggcgagcccggctttcccggcatccaataccgatccgtccaccacggagcccagcgcacgcagtccctgccagacggatgcgtatttggccgcgccgtggccggtcacatccaccacatagctgacgccgtcgcgttcgccgtgttccgcgagcgccgcgttcacccgttcgacgatatgctccgggtagtcgatatccatctcgatccagcgtcgttcggcggcgtcctcgtccggcaggctgatgctgccgtggttgagcgagaagtacagctgcttgcggcgcgcatcgttgacgcacagcgtgacgtggcggtcgagttcgtgttccttggcctcggcgtccgggacgtcaccatccgattggcgcgaactcaagcgcggcacgtcggccaggaaatcgatgccgtcgaacatggcgctgtcacccagcacgaagttcatcatctcgccttgcgggtcgagtacgttctgtccgacgagcttggccccggtggcgaaggccaacgccttggcggccacgatgccggcgcgcaggccggtgaatggcgccgggccgatgcccacgacgatctcctcgatatcggcaggagtcaggccggcctcctcgaccgcgcgcgcgatattgacctgcagtttctccacatgggtgcgcgaatcggtctctacaatgggctcgcgccccacaatgccgaccgtcgagccgaatgaggtgtcaatcaccaacgtgcaacccatgaatcctcctagtcgtaaagcctctagagagtgtacatcgaggagtctatgggcgcatggcttattgcaggtcgaacgcggcccatcgcttgccgactgggacgaatgcgacggtacgagtgccgttgctggtgagttcgccgtctgatccagcggatgcgacatcggaggaatcgagaggtcgatcgatatggatttcaagtcgttctggtgccaaggcggtggccatttgttcgccccactccataagcaccaccgtgttctcgccggggtcttcaagttcttcgtccaatcccagcgattccagctcgtccaacaaacgcccgatggcgtcctgccccggcgcataggctgagccgcccagacggtaggcatccacatgcaccagatgagccggagtgccgtcggcgaaatgcccgtcaagttcgcgggcaatggtgaatgtaggagacacgatgggttcggtaatgcccagccccgccccaaagccctgggcgaatgtggttttgccggcaccaagagggcctgagagcagcaatacatcgccgccgtgtaccattccggccacgcggcggccgagctcctgcatggcctcgctggtgggagccgcaatagtgtgttcgctcataaatacccctttatcgacttttaccgacctttatgactgatgtcttcaatgcagcgttccagcgcatataccgggtcgccgccgttcgttttgctttgctcatccgcccaggcgagcatacggatgcaatgcgcgagtcctgccgaagtccagccgccaagttggcgcatcgcattcttcagcacccacggattggttttcgcttcggcctgtgaaatcgtgccggcccggaccgccgaggctttggcaatggtacggagcttcatggccaacgcgccgatcagcgcgatgggatcggtcccttgttccacagctgcacgcatcatgacgatggcttctgcggttttgccttccacggccttgtctgccacggcaaaaccggtgacctgcggattggcggtcaaatactggttgacacggtcgagccccatcggattatcgtcaaagtcgaaacacaattgctcgcacatggcggcgagttcgccggttttgccgccgagcacggataccagctgctgcgcggccatcggttcgactctacgaccgcgtttctcgaattctccgaatacgaaattgagttgggcatccggtttcttcaaatccggcacgtcctctttgcgagcgccggctttcaccagttggtcgatgatcttgcgccctttgacgccgccctcgtgctggcagatcaccacgctggagccgttcggatccttggcggcctgcttggtgtacgtcaccagagcttcggcgagcttttcgtcggcattctgcaggttgacgagtttgaccacggcaacgtcggaaagcaacgatgggctgacggcttcatcgaaggcatattggtcggccgatgtggcgtcgagctcgatgagttcggcgtcgggtcgcgccttcaacgcttgtgcgcacagtgccttggtgcgcgcgtcgttcaaatacgagtcgcctccgggcaccacggttaccggtacgttcgctgctgttttcgccatgcccccatctcgccacacaggttggacaatgacctgccggcataacggcccggcagcactccgcgattaggcgtatgcctcatccaacagggcgtcgatatccgcgaaacgcttgggagcgggacgccataccgggtgaccggccgcgatgaccaatgccgggtgttccaacgcgcgcaggtcgtccagcggattggcattcagcacaagcaaatcagcggatttgccgacttccaaagaaccggtctcggcatcgacgccgagaatggaggcgttgacggcagtgactgcgtgcagggcctcagccgggctgaaaccggcgtatgcgaccagcagctccagctcacgccatgtggcgtactgcggcacgaatgtcatgcctgtatcggtgccgacgcctatcatcaatccggcctcgtgcgcctgacaagcacctgaaaccatgccgccgaccacattcttggaattctccaattggatgtcggtgatgccggtcgcgtcctgtccaagcaaggtcaggggaaggccggcggaaagtgtcggaaccagcgccgagtatccgcgcaacgcattcggattgtgccggaacatgccgatcaattcgtcgtcgagcacgctgccgtgttcgatggtatcgacgccggccagcagcgaacgccgcacgccttccgggctttgcgcgtgcgcgccgacaataacaccgtactgatgcgcctcatcgcaaatcgcccgcatctgttccacgctcatctgcggactgccggcctcgccgatttcctgtgcatcggttacgccgccggtcgcggcgattttgatggcgttgacgccagccttgagattctgcgcgactgcggtacgcgcctcttccggggtgccgctggtcagtgcgataagcggggcgccatggccttcgggaatcgccatcagcggtccggatgccaagatacgcggtccgaggatttggcctgcatcaatctgatcgcgtaatgtcacgacttcatatcccacgtcgccaagcgtgcggatcgtcgtaacgccggattccagcaatgttgtggcgttgtgtcttacggttgcggccatgtacggcttgcccaatggcgaatgcgcgaatgtggcgaccatacgttggcctttgggcgtcgccagcttcggattgagcggcttgccttgggagaacagatgggtatgcgcattgatcagccccggcatcacgattttgccggtgccgtcaagatagtggtattcggctgggatactggtttcgatgctgggtgcaacctgttcgatacgtccgtcggctccgaccacgatcgtcatgttacgcagtatggttccggctttatctccggtgacgatggtggcgtgggccaatgcgaatggttcgactatcggattatgagacaacatcatcgccggcactccttcatgcagctggttgaactggtctcaactgtatcgcagttttgccggctgatggtttatgccgcgcggcctatcgcataggttcggctggctattgcgatggttgctgcaccgaataccgcattggctattcggcttgccgccgcgtaaagagacgtctcgtctcctcgcaccagagactgaggcggacacgccaagcggaaccgaagcgcacgccaggcattccggcctcataacgacggacatgctggaggcaacggctgacgaacaccagtagcatgccgataccgatttccaccgccacaatcagcacggcacccgtaacgccgtctttccatgggatgacggccatcgtgctgccacccagccacaacgccacccgttccatcaccagcgtgccccatgacgatatccacgcgaatacgccggccagccatggctcgcaccatgcgcaggccaatgccatcaatcccgccatcgtggccaatcccacaaacggcgacaccaacaggttcgccggcacggacagcaacggcaactccggttccatcaacacctgaatcggcagggtgaacaactgcgcggccacggtcatcgccatcatttcggcgatgccgtgcggcatcgctcgctcaaaggcaccggccagccgctccgcaaacagcacgatacccagtacggcggccgaagacaaggcgaatccgtagctggccgacatatccggattcaccgccaatacaccgattaccgtccagcacagggcgctcaacgcttgcgtacgccgccccatcgcatacgtcaacgcacctatcaatcccatgatgaacgcgcgggtgaccgaatcactggggaacatcgccaatgccagcagcacatatactccagagaccagcaacgccgtcagccgccgatcaagcagcatccacatgcataatcggcgcaccaatcccgccaccagtacaaagtggccaccggatacggccatgaggtgcatgatgccggactggcggaactgattttccaacgtttgcgcatacgtgctgttgaccggcatcggaccggtctcgccgccgatataatcctggccaagcacacccatcgtcaatcccggcaccaacacacgcccctgatcggacaattgttcggtcacggtgaaaaacgcctcctgcacatgcgcaatcgcggcgagatgccacggcggagcccgcacctgtgctaccggctgttttccttccaagagcagccatagtggtatgcgtccatatcgcgcttgctgcaatacgcctgtcagcagatggaccgcgcctcgacgcaactgcccacaatacgattcgtcggcgtatacacgcacagcgaccgtggaacgtacatccgtaccatccacagtgatgccgctcagccgtatgtccgtctgacaatcgtatgtgcgttggtccgaagcgatcacgggcgtcgtcaccgtggccatgacttcgtggtatgaactggattggcgagcttgtgcggaggcaggatcatgccaggcaatggtgtccgacgcgattgccgtcatactgccgatgcacgccaccgcaacgcatacggtcaatgttcccgtccaccggatccgcaggcggaaagacaccacgatcatcgccgccacggcagcacatgacgccactgttataggcaatattcgtgtgacaggccattccatgccgattatggtgacgccaatgccagctccggcatcggcctttgcctgaccagtgccgagtccatcagacatcctccatgcgaataatgcgtgcgctcccagactcgccgcccacatcactatggcgatcggcagcatcctccaatcgcggctcccctgctcgcgcagtatccaatccctgctcatccgaccgtcacctgccctcgtatggtctccaacgtcttggagccgatgcctttgacatccagcagctgatcgactgatgtatacccgccaatcgccgtgcgatgatcaatgatccgctgagcggtaaccggcccaatacctttgatggattgcaattcctcagcggtagccgtgttgaggttgatgagaccatgcgtggaagcgccggcatcgctgccgtccgtctgcatgtgcggagattgcgtggtatccgattcggggttcgctgtggcatcggaatgctccgactgctgcggatccgtgcgtttctcgtccgtggtgttctgcgatggcatcgtctgatctccagcggagccgcccgtggtctgcatggcggtcggttgagacagcatggccatattcatcgactgttggaccagcaatgccaagctgatgccaagggcgacgatcagcagcaatatcacggccaaggcatgcccaatggtgaacgacaatcgcggctgatcccgggtgagtctggctgattcgccgacggcatcggcggaacgtacgccaatcagatccgataacgcacgtttgtcacgggtcgcctgccgcagaccgctctgcgccctttggggcgggtggccggccggacggatccgtgcatggccgggaggcggcggaggcgtcgtgggccgttccactcgcggttggggcatggctgcgctctgcctgctgaatgcgcgcaaacggttggcggcatggtctgcgcgatggttatgagaaacgcccatgcatccacgctgatggattcatgggcgtttgtccagctgaaacggggtatgtggttctagcttatgaagttatccacaattgaggtgggcggttgacgctcccctcagtctcgctacgcgagccagctcccctcaaagaggggagctggctcgcaacaagtcactccgcgggaacgatggagacgatcttcggggccttgacgatcaccttgcgcggctccttgccgccaagacggtcggcgacggcggccagcgcctgcttctcgagatcggccggatcgatgtcgaccggcacttcgagcttggcgcgcaccttgcccttgatctgcaccacggcggtcacggtgtcgtggcccacgtagcgttcgtcggccaccggccacggctcggcggacagggattcggcgtgaccgagcttgctccacatctcctcgcagatgtgcggggcaatcggcgcgagcatcaggatcagcggctccacggcggcacgcggcacagccttcagaccggtcaggtggttgttgagcacgatgagcttggcgatggcggtgttcgggcgcatgccttccatttccgcggtcacttcggcaatcgtgttgttgagcagcttcagggtcttttcgtccggcgtgtcctcagtcacatgggcctggccggtggtctcatcgaccacattgcgccacagacgctgcaggaagcgcatgctaccgaccacgttgcgggtgttccacgggcgagactcgtccagcgggcccatgctcatttcgtacaggcggaaggtgtcggcaccgtagttttcgtacatgtagtccggggtcacgatgttcttgagggacttgcccatcttgccgaactcgcggttggcatgttcgccgttccaggtgaaggtcggctcgccggaggcgtcggccgggccttccacgacctcgtcggccggcacgtactggccgcggtcgtcggtgtaggcgtaggcctggatcatgccctggttgaacagcttgtggaacggttcggccgagtccacgtagccgaggtcgaagagcaccttgtgccagaagcgggagtagagcaggtggagcacagcgtgttcgacgccgccgatgtacaggtccacaccgccttcatcacccgagtacttgttgtggttcgggcccatccagtagtcgaactcgtccttctccaccatgtgcttggtgtcggtcgggtcgatgtaacgcatgtagtaccagcaggagccggcccagttcggcatggtgttggtgtcgcggtagtaggtcttcttgccgtcgcccaagtcgagctcgaccttgacccagtcctcgttgcggctcaacggtgcctccgggttggactctgcgtccatcggatcgaaggtgcgcggctcatagtcgggcacgtcgggcaggttgatcggcaatgcggaatccggcagcaggtgcggggtgccgtcttcgccgtagacgatcgggaagggctcgccccagtagcgctggcgggagaacagccagtcgcgcagacggtagcttacggtgcccttgcccacgccggcggattcgagccaggcgttgaccttggcgatggcgtcgtccacgcgcaggccgttaaggctcagcgcgtcgcccttggcttcggtggcctcgacggaggagttgatcacgatgccgtcatgggagacgaacggcgccttgccctcgtagttggccaagtcgtcgccggaatccggcagaggcgtgacggtgtagatgacaggcagaccgaacttcacggcaaagtcgtaatcgcgctggtcgccaccaggcacggccataatggcaccggtgccgtagtccatcagcacgtagtcggcagtaaacagcgggagcttcgcgccggtgatcgggttggtggcgtacaggccggtgaacagaccggtcttctcaccggcctcgttcacgcggtccttggcggtcttggcttcggcggccagacggtaggccttcaccgcctcgaccgggttggcatagccgcccttccagtcttcgggtacatcggccggccattcggcgggcacgttctccagcaggtgatgttccggggaaaccacggcgaacgtggtgccgaacagcgtgtcgggacgggtggtgtagatttccatgtccttgtcaccgtcggcagtggccacggtgaagtgcacggaggcaccatgggattcaccgatccagttgcgctgcatgagcttgaccttctcaggccagttgatgccgtcaagatcggcgatgaggcggtggccgtacttggtgatgcgcatggaccactggcgtagctcacgctggaagaccgggaagttgccacgctcggacttaccttcggcggtgacctcctcgttggccagcacggtgcccagacccgggcaccagttgaccggggacttggagatgtaggccagacggaagtcgttcaagatatcctgctgctcggcgtcagtgaggtcggaccactgcttgccatcggactcgtggcccggaatggccttttcgccggattcgaacttggccacgagctcggcgatcgggcgtgcggagcccttggagccggacgggttggtggcgtcctcgtcgtaccaggaatcgtagatgcgcgagaagatccattgggtccagcgcacgtagccggggtcgatggtggcgaacgtacgacggttgtcgaagctcaggcccatacggtgcagctggcggctcatgttggcgatgttcgcctcagtggtcacgcgcgggtgctggccggtctggactgcgtactgttcggcaggcaggccgaaggcgtcgtaacccatggcgtgcaggacgttctcgcccttcatgcggtggtagcggctcaccacgtcggaggccaggtagcccagcgggtggccgacgtgcaggcccttgccggacgggtagggaaacatgtccatggcgaagtaggcggtgcggccttcggcgttacggcccttgccgtccttcaaatcgccgttgacgttggcggcccagaaggtgccttgctcgtcccaaatcttctgccacttgttttcgatgtcctgcgccagtgcggcgttgtagcggaagttgggctcttcggtttgcgtgctcttctcgttgtcactcataaatcagcaaggtagcctcgcaactggacacgtcgtcaatcgttattcagcatccgagacgatggctttggggtcgccgttcagcgaaaccgtgagctttgtttggcttgtgaacgtatccttggcggccgtccagctgccatcctcaaccatgtcttccaatgcttccgcgattttctgcgccaattggctggtgccttgactcacggcgatgccataactgacctcgcccttgtccgcaatcacgtccatatactggggcccgttggccgcttgaagaccggaaagcaccgccatatcggaggctatggcatccgccgaccctacttgcacggccgtgacgcactgcgcataactgctgcgctcctgaatccgagcctgcgggtggttgccgcggaagatgccgactgtctcgtcacctttcactgcgcacaccgtgccgtcgcctacgtcgcccaccgaacctgcgtcattggtgaatcggccacgctcatccgacctgaccagcaaaccgacgctggtcgtgaggtatggtccggcaaaatcaacgatcgcactggacccatcggtgataggccaagaggcgacgaccatgtcgacctgtccattgtccagcatggagcgccggttttcggggcgaacctgtttgaagacgatctgcttgttcgcatagccgagtttggcggccacgtatttggcgatggtgatgtcgaagccctggtatgtgccgtcatgccatgctcccaccgatggttcgtcggctgcgaccccaatggcgatggtgggcccctccggcgctccggagacggtggtgacttgaatttggccgcaaccggccagaccggataatggcaatatcatgccaaaggccgcggcgaatcctgccatcagtcgggagcgaaatccgcgccgcatcggacggcgagcgcggagcatgctacggctggcgaacgatgaccagtggtgcataaccgtcaaacgccttacttgaacatgcgcgaacgtgtgaggaaccaggcaaccgcaccggaaagcaccatggaaatcacgataatgagcatgaaaccccacggcttgtcagtgaacggcatacccatcatgccgccatcgaagttcatgccgtacatcgagaagatcagggtcgggatggacagtgtgatggagatgatggtgaagatgcgcatcacgttgttcaggttattggacacgatcgaggcgaaagcgtcggtcatgttcgcaagaacgccgctgtagatgttggccatctcgatagcctgcttgttttcggtgatgacgtcgtcgagcaggtcctcgtcgtccgggtattgtttgatgcgttgcagggtggtgagtttctccatcacgatttcgttcgatttcagcgatgtggtgaagtacaccaaggtcttgctcagctccatgagcatcacgatctcgcggttctgcatggagtggcgcagcttcagttcaagcttgtcgctttcgcggtcgatgatgcgcaggtaacgcaggtacatcgtggcgttgcggtacaggatctgcaggatgaagcgcgaacgcatgaaggtgttgaagcctcggatcgtgccttccatgaatgggtggagcacgggcgtgtcctgcatgcagacggtgatgatgaggttttcggtgacgatgatcgacagcgggatggtctcgtaccagtcgcgtccgccacgctcttccacggtgggaatgtcgacgatgatcatcgtgtaatcgtcttcgacgtctacacgtgaacgttcctcgtcatccaaaggggcgcgcaggtcggccaggtcgatgccggtttgcgaggcgacggtggcgagctccacatcagtgggttcgctcaaacataaccaggagccgttttccggtttctcgatctgctccacttggccattgattgagctgaagattctcagcatgtcgcctcacccgccttccgcgctttcctactgttctatcgctgtacggttccaaaccgagattagtctagacccaccgttcgaatttgcgagcggggtttcgcatagcgaccgtcaccagacgattggctgccaacttggcatgtgcggtcctcgcagatcggtcggcccgttctcccagtcggcgctgtcggcgatggcgggagccttgttgtattcctccaactcccacaggggctgttcggtgggggtgccgttgacgctgtggcgcactttgagccggcaccagcaggcgttgcgcatgccgccgagtgcgttcatgccgtccgggtcgagttcgagcaggttggagatggtggcggtaatccatgagccatgggtgacgagcatcagcgtggtgggcgtgctgtctgaataggcggagtcggtgaccagtgcgcgcacggcatcggcacctcgctggcccacggcggcacggctttccacaccatgcttggtttcgcccccggtgtgctgtttccaagaggcgtagtcgtcggctgccacggctttgatttcggcgcgggtcatgccttcccactcgccgaagctgcgttcacgcagtcgttggtcacaggtgactggcaatcccaaaatatcggcgaaggcgtgtgcggtctgttgggcacggaacaggtcggaggtcatcaccaccatgcgccggccggcggcgggagcctcctcgaactgtcgcgtatcagtgcgttcggcggcgtcaggaccgggctgggcgatggcttcgggatgctcggcaagtcggttcaccttggcccagtaataccgtgaagcgagtgcgaatccggtctggtcgacctgccattggcctacgatgtcgagcggcacatcgatctggccttgcaagcgatgttcgagattgtattgcgtacggccatgacgcagcatcatcacttcatcgatcatcggttttcgccacctcgttctcttgcggtttgccatactcatctcagcacaacccctagaatggcggcatggagatttctgagtcgacttgggcgttcatcgccaaacaccgccgtgaagatgtgcgtgatgtggccttgcacgccaagcatgatggcgacgtggatgtgccgttcgcgctggagcagattgccggctggcagcgcgcttcactcaagctacctgactgggcgtcccatgatgggctgattttcccgccgcaagtcccaatggaacaatgttccagccaattcaccgcacagtacaaggctcggctggcacagcgattgttggccgaggaagcagtcgacgacgattccccgacatccctagtcgatctgaccggcggtttcggcgtcgacttttcttacatgtcccgagtgtttgaccatgccatatatgtggaacaacaatccattttatgtggtatcgctcgccataatttcccgatactcggccttggccacgccgaagtcatcaatgatgattcaacagcagtgcttgatacgcttggccgagtctccatgatcttcctcgatccggcccgccgtgacgatcatggctcgcgtacctacgcgattgccgattgcacgccggatgtgctgaccctgaaggatatgctgctggccaaggcaccgacggtcatggtcaagctctcccccatgctcgactggcataagaccgtcgccgatttcgccggcgcggtgcatgaggtgcatatcgtctccaccgggaatgagtgcaaggaattgttgttggtgttggggcgcggccgttgcgtctcaccgctcgtggtatgtgctaatgacgggcaggtgctgtcgtacaaggccggcgataacagcgacaatcacacccctatcagcgattctgccttggttgcacgcaatacttgcaataccgaagactccctgtctgaggaaagcgcgaacggcttcgattcctcgcattggaagtacctttacgagcccaacgcctcaatcatgaaggccgggtgctttgatgttctcgaacagcgcttcgtcgtgcatcacatcagcccgaatagccacctgttcgtggcggccgaacctattgccgattttccaggcaggtcattcgtcatcgaatccatcgtcaccatgaacaagaaagaactgaagcagctattggccggtctcacgcacgccaacatcgccgtacgcaatttccccctatccgtggcccagctgcgcaaaaaactcaaactcaaggacggcggcaacacctacctcttcgccaccaccgacgcccaaggccgtcacctagtactgcgcactgaaaagcgaaaaagtggctccctctgacgaggaagccaccaatacgtcagctaatcagtccttggcgatggtcttgccggcggtcggaccggaggcaaggttctggatctcggtgacttcgagaaccggaatcacggccggcttcttggtgcccttttcctcggcgatcttgacctgctcgttgtagatgtcgtcgtcaacgtgcagcaccacgttgccgcggaagcggtagccctgcttcttctcgaggttggcgaaggcgatgaccagcggagagccgttcttgaggttctcgtagtgctggccggcggtgcgctcgtggtaggcgatgtgcgtgtcgtccagcacgaacagggacatcttcgggccgaggtccagttcgccgtccttggagacggtggtgatccagccgaggttgttcttgatgaattccttgatttccggagtaatgactgccatgtcgaatcctttcatgattgctacggataacgtatccttactctttccagagtaccggtttcgagcgcgactagcccggatgttcgctgtgagtaacctcaccttcgcacagctttcatccggttcttacctgcttggcgatgccgcgccccggccgcgcaccagccacacacctgtcacacacccgacgcccatcgaccggtcgattttggccggtagttcccgtaatctgtgagccgagagagccacaagttttcctaactgtcctgaggtgcaccatgggtttggtcgaacgtttcagcaagctgcgcagccgctggtcccgcagctttcccccgaatctcgcccgactcatgttgctgggctgcgctgcattatggggtggcagttatctgctcgccaaattcgccatggaggcgattccgccccaatggctgatgggtctgcgcatgataggcgcctgcctgtgcatgctggccttgttccataagcacatcgtgccgtatctgacgccgaagatcattgtgccggcgctcgtggtgggtctgacctactggggcacgatggtcacccagaccatcggcctgcagaccattgaaccgggccgcagcgcgttcctgacggccgcctactgcgtactcaccccgttcgccacgtggatcatttcgaaaacccgcccgaaggccatcaatctggtcgccggcgtgatctgtctgatcggcgtcggcttcgtctcgctgaagccgggcggttcgctgtctctgagcgccggcgactggctgaccatcgcaaccgccgtcatcttctcgttcaatctgacctgccttggtgtctacaccaaacggttcgaccctatcgccgtcacttttgtgcagttcggcgttgccggcgtattgttcatcatcggcgcgttgttcaccgaacccatgccgaacgccagctggctggcaccctcagtagtggccagcgtgctctatctgttcctcggcgccacgatgagtgcccagatcatgcagaacatcggtctggctcacgtgcctgcctcgcaggcgtcaatcatcatgtgtacggaaagtctgttcgccgtcacgttctccgcgttgttctggggcgagacaatcatgtggacttcgctggtgggctttgcgctgatcttcgtcgccgtgctgatgtcggtaatcagaccgaccgggcagtcgctgcatcgtaattgacgatgtcccgcggcctgcggcgacgcgaaacgcacgtgtgtgcgccgcagggcgtgtccgacctgtacgaaggccgattttgaaggtctcgtgtaggcctcgccccgcttccatcgagtctcaggcaacctgtcagcccgacaccctacggtcgtgcattgtgaagaagttttttgaaggaatctccctctcatccatcgtggcgggcacccttgccgccgtcacctcgttcctgctcgcatcgaagatcggcatcggcggttcagtgatcggagcggcggccagttacgtcgtctccgccgtggccaccaagatctaccagaacgtgctcaccgcctccggcgaaaaactccaatcggcctcgtcctccggcaacgggatcacgaaggacgccgagaacggcgatgccgatggcggcaccccccgaacggccggcagccggaccgacgttcgggacgagcccgatacggcgacgggcgtgaccgccgatgatgcttcctccacacgcagaccgcgtgaaatcgtgttcagccgggcgaacggcaggacgtactcggtcgatgagctgcgcaagtcccgcttccgcgcttcgaagcacaccgccatgatcgtcaccttggtgtccggcctgctcgccgtggcggtgacggccggcgtcgtgatgctggccacgcagggacgcggcacggacaatctcgtatcccccaccacgaccacgcccgcgcgcaacgacaccggcacgcgaacgggcacccccgatcagaacaacgctctgccccagacgggcaccggcgatgattcgaagggaaccagcaaggattcgaaaaccgacgccccctccaccgacctcgacgccaacggcacctcgggttcgaccggcgccggcgcctcggattcgaaaaccgacggcaccgtcaacggttcgaacggcaccggcacctcaaagaatccgaccaccgaagacccgaccagccaaggcgtcggcggcagccagaccggttcgaacggcaccggcaccggctcgacgcaaaaagatccatcgggatcgacttcaaccagtaccggcaccagcggcaccagcggatcgccggccaccggcccagacgcgggcctgtctcgttaagtgtgtaactggcgttttcattgttgtgttccctcgcttggccagcggtcggcgaaggtgatggcaaaggcgttgagcgcgggcttccggcgcgcgctccatcgtatccgtcccttgccggtggggtccagcgagcggacggtcaggtacatgcacttgagcgcggcctgctcgtcggggaagtggccgcgggcgcggatggagcgcttgaatctcgcgttgagcgattcgatggcgttggtcgtgcagatcacgcgccggatctccacgtcatagtccaggaacggtatgaaccgttcccacgcgtccatccacagcctgcggatcgcgggatatctcgcctcccacttgtccagcatctgggcgtcgcggccgccgcggcggcgggcgacgcccagatgcccagcacgtcgcggccgccctccagatccacgccaacggccacgtagaacgcgcggttggcgacctgcccgtcgcgcaccttgacgacggtcgcgtcgatgaacacggccgcgtacacacgatccaggggacgcgagcaccattcgtccttctcggccacgacccgctcggtgatgcgactgacggtctccctggacacgtccgccccgtagatctcctggaagtgggcgctgatctcgccggtggtcaggcccctggcatacagggacagcaccacctcgtccaccccgggcagccgccgctgccgtttcctgacgacgaccggctcgaacgagccatcgcggtctcgcggcacctcgatcctgaccggacctaccgaatcggtgaccacggtcttggcggtggtgccgttgcgcgtgttcgcggccctgccgtccttggatttcttgtgcttggcgcggcccaggtgctcggccatctcctcgtccagggccgtctccagcacgcttttggtgaactgtttgggcagtccgtcgggccctgtcaggtccagtcctttttccttggccatgcgcacgaatgtgagcgccgcctcccgctcggcgttgcgtttttccgcgtccggcttcttcgtcggtgtcatgtttcccattgtcccagcacacatcgtccaccagcctttccgaccggccacacgaccggccagttaaggccagttacacacttcgagagacagtcccacgtataccggttctttgtttatgtaagggaatgattgatggttcggtttgcctgtttgtataatgcgcttatttatcttggtgccggatgtttttcggtctactatatggtggcctatcatgatgtgggcctgtcggtgctgctgatctccatcgtcaatgtggtgttcgacgtcagcgaatcggccagcgagctgcccacgtccgtgctgttcgaccggtggtcccgggaacggacgctgatcatcggcgtgttgtgccgcgtcgcgggattcatattgatgctgttctggtccgcgaacttcgccgtgctgtgcctggccaacgtgctggccggcatcggggccgcggtcgaaagcggcgcggcgtcctcgctgtacatcgaatacgcccgcaagcacgatccctcgctgggtatgaagaccttggtgtcaagactgtcggcgatgatcgctgtgtgcacgatatgcggcggtgcggtcggtgccgtgctgttcctgcttgactcccagctgatctggctgggcgcgacggtgttctacgtattggcgatcatcccgcttctcggtctgatgagggccgggtcgcgcaccaaggccgcagcgacggatgggagcgggacgacggaacggcaggccgaggcgtccgtcgaatccgatggatccgccgagccgggcgagtccgggacctcgctgacggtgttggatcatgtcaggcagaccgtggcggccgcggccgtgctgctgcggaagccggagatatggaatatggtggtgttcaatctgggtacgttgtcggtgctgacgttctggcagctgctgctgatgggccaccagaccggggtctggtggcagttcgccggcctagtgttcactaatatcgcgcagatcgtcggtagtcgtctgggtatgctacggctgcatccacgttccggcgacattgcgatcctcgtgctcatcgtgtcggcggtggtgcttgcggccacgccgatgccggcggtgaggatcctggcgttcttcgtgttctcctgcgcgcagatgtacgtggcgaacatgatctccagcagcttgcacgagagcattgacgattcgatccgcgcgaccgcgttctccgtgggatcgctcgtattgatggccttcaccgcggtcgtcaccccgctgtgcggctacatcgccgacacgttctcgatttcctggggtacactgacgacgatccccctgctggtggccctcctcatcgccggacttgcgcgaaagcctgaatccgacaaacgggtaaaagtcgatatttcgttggattgagacgtcaagggcttgcggacacgatgtccgcaagcccttgacgtctatatgtcattcattcatggttggaatgcgctcctcctacgcgtgcggttgaatggttagtccatcgctatcgtcggagggtgtcagggccgaagatgaaaccgtctgttccgggtgcgtgatccaggtggaatggattggcaacggtgtacgacttgtcgccgggtttcacgtcgtccgtgtcgaattcgttggaatccttgtcgagcagtgggctgtccagcgaggcgggacagtacacggtgacgtgccagttgccgtcgtccatggggatgagcacggtgcagtgccttggagaccgtctgctgcggcatcccttatggatgattccttgataaaggagtttcggggggggggcgggtaacaaaaacccggaaccgaagttccgggtttttgtctggctcctgcggctgggcttgaaccagcgaccatccgattaacagtcggatgctctgccaatagacaacgggcaattcgactgccatgtcaggtatggtaatctcgaaccagccagaagatcgataagccaaattacctgcgactgaagtgaggacggaatcatacgtagcgagttccctggtctcttgtattgcgcgggtgcgttaatcgcagtggcctcttgggctcttttcatgttctcgaaagaagtccatcggaaaggccgaacagtatccatcctgagattgcccgtcatttggatactgttcctcgtgagttcggcgccggctctcgcatcatatccggtttttgaaatatactcaggatccatggatccggatgtcatcgatttctacagtcagccgttcatacggctactgccggcggcgacctgcatagtgaatctgtgcgtatcggcatgctgctccatggctcttgtcagcaagcgcagaaaaaccgaacatcgaaaaatctgaaccacagcgttcgagatgagatgccatggaagaaccgctgtttccgctggccttggtgccgctggccgtcggattggtcctgatatacgtcgtgatcggatccaaaaaccgggaagagaacgcaaaaggactcttctgcgtgtcttctcggcgctcatggtcgttgccggcgcgttggccatcgcgagacaactcgcatgacgcttcacgctgcggctcggcttcccggctatcggtcgaagccagtccacgggccctctgtgccattccccgcaatcaaacagcaacgcccggtctcaagcccatgagacacttggaaccatgactaccatcatcatgcgcacctcgcatgataatcctagccaactgtttttggctttgttccaaggctttcgatttttgggaaacctaccgattaccctcgtttctccacgaggcacccacaggcacccaagaataatctcaactgattcccaccccaccggtcggccaccatcagggcgggttctagtgatcgttgcaacacctgacctaccgcaaggagggtcaggtgaccagaagccaccgaaacgaagaccgtggcggggaacaccgttggacgttcaacggcgtcgaatatccgacgaggaagctgatgtgcgaggcgagacgcgccgagtacgtgcgcctgctggacgaggaaggcatgaacttcacccaggccgcgcacgcggtcggcgtctcgaaacgcaccggcaaggcgtggcgcaacggcaggacgcgcgccacgggaaggaacgagaaacccctggtggactggtatcgttccaccatggacaaacccaagaccctccatccgcgatacctgagccaggaggagcgcatccagatcgcggaccgtctgcgtctgggcgattcgatccgcgccatcgcccgcctgctgggccgcgaccccggcacggtcagccgcgaggtcgagcgcaacaggaatcccgagtccggcggttacgagccttaccgcgcccagcagaaggccgcggaccggctcaaacgccccaaaccgcgcaaggcggccgagggcacgcgactgtgggacgagatcgccgccgggttgcgcaggcattggagcccggagcagatagccaaccggctgaggctggacttcccggataatggggatatgcacgcgagcgtcgagacgatctaccaggccatctacctgcaggccaggggcgaactcaagcaggagctgaaacgcgccatgaggcaggggcgaaccgcccgcagaccccaaggcggccaaggccgcaaaccccgtttccgcgaacccatggccatgatctcggagcgacccccggagatcgaggaccgggcggtcccgggccactgggagggcgatctcatcaccggcagccgcaacaaaagcgccatcggcacgctcgtcgagcgcaccaccaggttcacgatcctgctgcacctgcccgacgggcacgacgccgaacacgtccagcaggccatcatcgacaagatgcagcacctgcccaaactcctgcgcaacagcctgacctgggaccagggagcggaactcgccctgcacaaacggatcggcgcctcgctggacatggccgtctacttctgcgacccgcactccccgtggcagcgcggcaccaacgagaacaccaacgggctcctgcgccagtacttccccaaaggcaccgacctatccgtctacccggaggactacctcgacgcggtcgccgaggaactcaacgaccggccacgcaaaaccctcgggttcatgaaaccaagcgagaagatcatcgaactgctcgacgccgcgtgataacctcaacaaccgacaacgtgaccatggaaggccgctcaaacctcaggtgttgcaaccaccactagaatctgcccagccggaacgctcgtatctcgcggcgttggcgatctcgttcgcctgaagcgtcgggcatcgcgttgacgatccgctcgaccttctcgcgcaccatggcgtcgagcttgctctcgaacatggcctggtcgaactgtatgatttccttggacatggctccatgcctctttccaatcgcggtttttcattgtctggcgactgaaaatcgtacccggcacggcccatgtccttttccatcaaggccggaatccaaaaatgcgcaagaattcggtcgttatccccttagagactaaaggaattctattagttcagcaaaattttatatctaattttcgattatccgcataaacactatactttcaagtattttgaagtatagaaaaaactcattttaccacgaatttaccacgattgaatgagccttgatatgacctataaaataacacccaaaagacatcattacacctaaatggtgtctttttaaaaagcagtcaatcctaagactaactgctttgtgtgtatggatatgaaattgtcaaactgggatttgtcttacaacaatttatatatgcataaaaagcaatatatttatgaaaacaccctaaatccaaaatctactcaattcatttttccttacataaaatgttctcgtatatttcacttcctcaccaagtgtttcccctatcaaaacttcaaaatcattgatatcaaattctggaaagaatgtatctccatcttcaatatttaaatctacttctgtgatatacattttatctactatttgcaaagcttccttaaatagtccatatccaccagatatgtatacatctcgtcctttagccaataataatgcatcttctaatgatttaactgaaactaaattatctccttgatactctgttgtggtggaaacaacaatattcattctattaggcaacggatgaccgatttcttcataagactttcgccccataataaccacattacccgttgttaactctctaaattgcttttgttctccctttattttccatggtatattaccattcttgcctataacattattctttgacctcgcaacaatcaaacctatcatctatttcatcctccataatatgatgtcgtacctgtgattccatcaagtgcaccacatcttaacaaactcaaaattatctcgaactaaccagctcgacaaattcaagtttgtccgtttcttcatatccacattatatcattttcatatctgcaccacaataaaattttatgcaccgataatcttagtgaacagctctaacaaacaccatttcatcactccaatctgaaatttaggtatgaaaaaagcagtcaatcctaagactaactgctttgtgtatagagatatgaaattgtgaaatagaatttgcctatttcaaatcaaaaagagaattttcatagtcctttacatagtatcgtatatttttacgccccttttgaataatggtatgtccctctgcttctaatttttctttctgtgcttcaataccatttggatatttagcatttaattctccgtttgcttttaatgttctccaatagggtgtttcatcttcggaacgctgataactcgcccacgctacaatagaaacaaatatacccgctgtaatcggctctgtaaaatctgcaccactcaattttgcaaagtgttctcgtatttttccaaccgtaatcactttaccatacggaacttttttcattactttgtcatagtcaatcgggggagcaaaatacattttgtttccaccatatttctcaatacttttctggtctatgataatttgaaattttggcatatccttactatcatgcaacatagcattaaaatcttttttatcttcatttgccatttgtgccacctcctactttaaggatagtctgtttcttatttccatgcaatgaggctgtttgaaaattattaacactttcaaatttgtcgctttcttcatatccatattataacagttccatatatccgccacaataaaaatcagcatacccttagcatttatggaacaaaaatgcacactttttctttcttcctcttgattaccccacaacagaaaagaaaaagccctgtcaagagccttgccaccattggtggtgctttgcactctttactgggctttttgtttgctgtatcttccatgcaagaggaaattaaagacctctgttccatttcgcctttagataatcttcatagtctgcttcattgaagtctacttgtggagaagtgtcgggaatgttgtttctgttgtctatatccgcaagctgacgaaatatccaatcatcataagggtcatggtatttatactctttgggctgttctctgtatcggtctaaccctcgcatttccttatgcacttttatcatgcgttccagtttttgacgctgtatcaactgcttgatttccataagttcttccaactccgtaacctcattggtaatgtagttatggatatactgtatgagtttatatgccttgtaaaatgtgcattctttttcatcatcgaaaaattcattttcagacaggtaatctaaggaaacattgaagtcttgttcccgtttgataatatccatgatatagggctcggtgtggtcaatatacttccattctcccgacaataattcattgggcgttacacccagcacgtccattatcttctctaacgtatcaaaggtaggataattcacgccacgttcaatcttggaaaggctctgcatattgataccgattttgtccgcaagttcctgttgtttcattcctctgtgttttcttatggtctgtatgttttctcctaagaaactgattttcttttcataatgctccataacttagtataaccgctcctttcgttgcttttcttggtatttataagcatatcatacttaatctatatctaaaagtcaacaaaaacttcttgacaagtaattctaatggagttattatcgtattagacagagtgattaagcacgctagggtcaatcacacgcttgagtaagcatataaaatatatattttcactttgatagcatgaataagcatggactatcagaccgaaaataaggtttctgactggggctgttccgtttagccacgagccttacaaggctcgtgagcgttaagaacggggcagacacaggaagaaagggaacgcctttaggcgttcgtaaagggcgtatatgtaacaccgccctgcgtatacatgtcatagtacctagaaactgtgataaataaaggaaaaaacacgatttttaccccgcaaaaaaacggggcatacgaaaggagaaatgaagtatcgcaacacacgaaaatttatctgttaagattgattacatcagcattgtatttgaaactgcaaacgcagaagatgtcatcatgcacattttaggtttaccgactgacattttcaatgtctatccagcaacggtaaaattcaagacttatcaagcacgctggcagattggagatatttatgtatcgggggacgcaagaaagacagaggacaacccacaggggctaggctgttatcttgttatgacgggcagaggttgtgatgatattttccgtattctcaacagcagaaactatacctttggggatatgttcaaacgttgcgagcgaagatacggactggataacttccatttcacaaggcttgatattgccattgatgataagaacgaaaagccattctttaccatagagcagataaagaagaaatgcgaaaaagaggaatttatctcgaatagtgagggctatcactttgacgaaagtaagtttgatgatttcgacaccgcaaagaccgtttatattggtgctggaaaatcgggattgtcctaccgcttttatgacaaggataaggaagtctgttcaaaacataataagacacttgatgaagtcggcagttggaaacggacagaaatgcaactgcgtgatgataaggctcatgcctttgccatgacattcaaggacagaccgctggaacttggggaactggctttcggactattggcaaacaacctacgctttgtcgtgccaaacagaaatgaaagtaataagagcagatggaaaacgtgtcggttttgggaacgctttttaggggctgtggaagtcttaaaactgcaagtaccgaaactacataattctcttgaggaaacacaacaatggctcacagagggtggcgtgatttccgctgtgaaaagtttttacttcttggaagaacatgacgcattaggtggactggaaaaagtgggaactatgcttgataaggcaagatacagcaattccctttccagcaaactaaccgcccacttacagaggatagaccgcaccgaccttatcccctatatccagtatgacacgaaacatgggaaagggggtatctgatgaataacaacgatattcctgtatgggaaaaatacacccttaccattgaagaagcgtcaaagtatttccgtatcggagaaaacaagttaagacgcttggcagaggaaaacaaggacgctggctggctcattatgaatggcaaccgcatacagattaaacgccgacagtttgaaaaggtcattgacaaattggacgcaatctaatgcaaatgagccttgtatgtgttatgataaacacaagtcatatcaaggctctttccaataaggaaaggagcagacaccatgaaagaaaaaagacgggatagcaaaggacgtatcctgcatactggagagagccaacgaacagacggaaaatacttatataaatatgtggacgcatttggaaacacaaaatatgtgtatgcttggagattgacacccacagacccgacaccaaagggaaaacgggaaaaaccctcacttcgtgaactggaacagcagataagacgggatattgaggacggtatcgacagcacaggcaagaaaatgacgctttgccaactctacgccaaacagaacgcacagagggcaaacgtgaagaaaagcacacagaaacaacgggaacagctcatgcggttattgaaagaggacaagttaggtgctaggagcattgatacgataaaaccctctgacgctaaggaatgggcgttacgcatgaaagacaaaggcttttcctataacaccattaacaaccataaacgctcgttaaaagcgtcattctatatcgccatacaagacgattgtgtaaggaaaaacccttttgatttcaagttgagtgaagtcctagaaaatgataccaaagagaaagtcgcattgacagaggaacaggaacaatccctactctcattcatcaagacggacaatgtgtatcacaagtattatgatgatgtgctgatactgttaaagacaggacttcgtatctcggaactgtgcggactgacagtagccgatattgatttcaagaatgaagttgtgataatcgaccaccagttactaaagagcaaggaacaaggctattatattgaaacgcctaaaacaaagagcggaataaggcaagtgccattaagcagagaaacaatacaggcatttcaacgggttatgaagaaacgcccaaagacagaaccatttgtgatagacggacggagcaatttcctatttgtcaatcataaaggcaagcccaaagttgcgattgattataacgccttattcgtccgtatggtaaagaaatacaacaagcaacacaaggacaatcccttgccacatatcacaccgcatacgctacgccatacgttctgcacaagactggcaagcaagaacatgaacccgaaagatttacagtatatcatggggcattcaaatatcagtatcacaatgaactggtacgctcatgcgtccatagataccgcaaaatcagaggttcagcgtctaattgcatagaagtatttaccacgattttaaccacgattgatagcgaaaatataagaagatagacctaggtatgtgagctttaccacaaaagcaaaatgcccgtagagccgataaaataaggctttgcggacatttgagaagatataaaaagatagttaaaaagacatatataatttatttttaattcgtatatcaatttattttttagcatgtcggacaatacagtaaatcaaccactctatggctaagataccaaggtagaaaagcgcccatacggaaaaactaatcagctttactcctagtgtctgtacagttccatgcccgtccactgttcttatgaaaaggaatacactaatgcataagaacaatatgaattgaatgatttggaaaattctccaacctttgttttccacaatcaccctcctgtaaccccaatctctatatgctgattccaccattataagccgcccttggtgaaatgtcaggcgccccgttgtctaattgaaagtgcaacacccgttggattggagattgtccggataaccagtccgaaggggcagattctagtggtggttgcaacacctgaggtttgagcggccttccatggtcacgttgtcggttgttgaggttatcacgcggcgtcgagcagttcgatgatcttctcgcttggtttcatgaacccgagggttttgcgtggccggtcgttgagttcctcggcgaccgcgtcgaggtagtcctccgggtagacggataggtcggtgcctttggggaagtactggcgcaggagcccgttggtgttctcgttggtgccgcgctgccacggggagtgcgggtcgcagaagtagacggccatgtccagcgaggcgccgatccgtttgtgcagggcgagttccgctccctggtcccaggtcaggctgttgcgcaggagtttgggcagatgctgcatcttgtcgatgatggcctgctggacgtgttcggcgtcgtgcccgtcgggcaggtgcagcaggatcgtgaacctggtggtgcgctcgacgagcgtgccgatggcgcttttgttgcggctgccggtgatgagatcgccctcccagtggcccgggaccgcccggtcctcgatctccgggggtcgctccgagatcatggccatgggttcgcggaaacggggtttgcggccttggccgccttggggtctgcgggcggttcgcccctgcctcatggcgcgtttcagctcctgcttgagttcgcccctggcctgcaggtagatggcctggtagatcgtctcgacgctcgcgtgcatatccccattatccgggaagtccagcctcagccggttggctatctgctccgggctccaatgcctgcgcaacccggcggcgatctcgtcccacagtcgcgtgccctcggccgccttgcgcggtttggggcgtttgagccggtccgcggccttctgctgggcgcggtaaggctcgtaaccgccggactcgggattcctgttgcgctcgacctcgcggctgaccgtgccggggtcgcggcccagcaggcgggcgatggcgcggatcgaatcgcccagacgcagacggtccgcgatctggatgcgctcctcctggctcaggtatcgcggatggagggtcttgggtttgtccatggtggaacgataccagtccaccaggggtttctcgttccttcccgtggcgcgcgtcctgccgttgcgccacgccttgccggtgcgtttcgagacgccgaccgcgtgcgcggcctgggtgaagttcatgccttcctcgtccagcaggcgcacgtactcggcgcgtctcgcctcgcacatcagcttcctcgtcggatattcgacgccgttgaacgtccaacggtgttccccgccacggtcttcgtttcggtggcttctggtcacctgaccctccttgcggtaggtcaggtgttgcaacgatcactagaacccgccagggatgttgcacctatggggggggggaagcatgttcgcacctgtcggaagaggaacgccaggtcatccggatcgagatcggcaacggcaccatcatccgcaggatcggtctgatgctcggccgcaacgcctcgacggtcggcagggagatcaaacgcgacacgtggttcccgtccaacgagaacgagtcctgccggccgtaccggccgaaacggctgaagacgggcccgtggacgggcggatactacatcgccggccccgcggcggcgcaaggccggccgcaggcgcgccaaaccgcgcaagcgctaccgcctgtcatgcgaacgcctgtgggcgcgggtggccgaatggctgggccgcggctggtcgccgctgctcatcagcggcaggctgcgcgtcctgttccccgacgactccgccatgcgcgtgtgcccggagaccgtctaccgttggatccacgccgaccgccgtcgccgtgaacgctgggcgcgtcgtcttccacgtggccacgggaggcgtcgcaggcgtggcggcgggaggacgtcgcgtttcccgattcccggacgggttcccatctccgagcgtccgccggaggccggagaccgcagcggtttcggccattgggaggccgacggcgtgatcggcgccggatgcaacccgcacaccgaggtcgagaggaagaccaggttcctcatggccgggatcgtgcccggcaagaccgccggggaaagcgtcggggcgcagctggcgatgttctcgccgctgccggccggcgcgcgcgtcagcgtcacgcacgacaacggcaccgggttcgcccgccacacgcgactgcgcgacgggccgggcatggacacgtacttcgccgacccgtactccagccggcagcggagaagcaacgagaacaggaacggcatgatccgccggtatccgcccaaacgcagcgagatccggatggacatggccggggaactgcgggagattgtcgacgaggccgacaaccgtcccatgcgcgtgctggactaccggacgcccgccgaggcattcgccgacgaactgctagaattgcaggaccaacaggggtgttgcacctctaaatagacatcgggcgcttactgtggcgagaactggatctacagggccaacgtgacacaaattatcgaagaacacggcatctcagtcacggtccaacggcagaatgccggaaccgctcgccgcatcgttacccaatgcattggtctcaatcttggtggtcggctaccccatgcccctaatcacaacccgcattcctgcaatcaggcatcaccacccggtctcaagcccatgagacacttaagaccatgactaccatcatcatgcgcacctctgatgataatcgcatgtggtcgtttttggctttgttccaaggttttcaatttttgggaaacctgccggttacgctcgtttcccacgaggcacctacaggcacccaagaataatccgggaacgttccaccaccctgccggcgctcagcgtcttcgccgaccggcacggaaaagcgcaataccccctgtggtttcatgatgttccgcatgggtggtgcccagaagcattcacccggcagcatgtctccatggcggacaatagacagaacgatacgcagcccgtgcaaccgtcccagccgccaatggcatccaaatccatcccgaatcccacaggcccattgcagacagcccagatcagctggctcatggtccaaagccgcctgcgacgccaccgtcccaatagcaggaacggtcagctgcgcagtatgatttccgccctgtcggccagttcccgttcgcgcacacccatggcagacaggatcgcttggctccgcgatggcatggtggaggtcacccgtgcgaccaatgcggagaagcgaccgaacaattccaagtaatcgtccttgtcaagcaaataaccaagatcaccgatggcctgatacacgttctcgttagcgcgcccatcgtaccgggcacaatagcagcgctcgtcatgcgcgcacaggttgcggtagaacaccagtctgttgaagatgctgtccagccgcttgatggtgatgcgccgtggcctgtcgtgcgtgtccgcatacaaaccggtgaaactttcggcgaccgccaatcggacggccggggactggacttggaagaaccataccgtctggccgaaggaaagatcgttggccagcacccacaacggaacctggccgttgtggtcttccatgcaatggcggatatacgccttgccgccatagtcgcccctgttgcgcgggttgccgtccaactcaagtatccgcttgaagaccttgtcgatcaatgccatggcgctcggacggcacctggaatcataatagtcgggattgagatacgggttgacctcgtcggggtgcagcccggtgaactcatgcgcgcacactgccttgagcgcggcctccgcccgtgtgatggaggaaaacaacagttcacgcaactcacggtcgaacaggaacagggcgtacagatcatcgaaacgcgcgcccgttccgtaccggtcatcaccagcggtcaggcatgcctttcggtcgaggaacaaatccttatagccattgacgatcggataatagccctcgcgcctgagcacatgacccgcaccggcatcgacggccatgccacgggagcgcagaatgcgcagctgttcgttcacactcctgtagggcttgcgcaacgacatggatccgacctcccccaatccagcgatgaaagcactgaggccaccccgcgtccacggaatggcctcagcgaaccgaacgaagtccagcttatttcgctgttacagaatagcgccaatcccccgcgaatgcaacccagccagacgacggacgatataatgaaacctccatatcatcattccagaggcacacgccggtccatcaagaccaccaccagaaaaacccaaacgcccacaaaggagaagacgcgcgcctccacgaggcctgtatgaccctcgctctttcaagcgtctgcacgaaccgggcgaagtcgtagatgccgtatgtcgtacatcgatgatgtcgggtccccaagcagggtgctcgtggctcttcaccaggaggctggaacactttctcgtcgattccgcaggagcgacgcaagccttccgctccttgaactgggcctggcctctccggcaagccctactacaataggactcactcctccgcagttcgagaatcgagtcaatatgtgccgaatttgccacattcttgcaggtctcctagtgtgtgccggactcctacgcacagtaagcggctttatttttgactacctgcatccagaatacgtgtctagctttccttcatatctttattttttacgagcggttcccttccttgtcgctgctggtgctatcgaaactattttattcctgacaaaaaggagaaataaataaagaaactcaaacaaattgtcactgctctagtatctgtaatattggctggaactgtgacagtaaatgcgtcggcagcagaatctatcgaaactccctataggagtcctaccctatccagctttccgtctaatgcttctctggaagatcttgagaaagcctcagataacgaagatctgagaattatctcatctccttctcggggtgctaattacaaaacgtgcgctgcagaggctgtagctttactgcggatttattctactacaggatccggctcgtcatctagtttcacgaatctcggtcattcttggcttatgatcacaaacctgtctggttctacggcagacattgctgggattaacgttgctgatggtaaatctataacagcaagcacttgggatgaatccgtagatgtcagtagagaatataagggtctgtggctcaatcttgattcgaagcttaattccaatggtattaatcttcagaatgtttccattcaattacccttaaggcaaattgatttagatacagtgaattctaatattaaaaataacgataaatggggctatcttaacaactgttctactttcgcttcaaaaatttggaattcaattgctaatgacagcagtaaagttgacgctggagccatgaatacaccagccagtctagcaaaaagtattacaaaagttggcaagcccggattcaatttgtaagtgcaacacccgtttccggatcggtcgtctttgattgtagtttggcaatctcctcgtcccatacctcgttgggtgtcttgtagccgaggagcttcatcgggggtgtcgttgacttccccgacgatcgcgtcgagctcggcctgggtcagtcggtcaaagctggttttcttgggcaggtatcggcggatcctgccgttcctgttctcgttgtgtctttcgtcaaataaatctgcgtgtcgggactggggtagggggctgcggacattttcttggagataatcacgcagccattccttggctttgacggtattgtaccgggctcatccaaccaagcgactgtttgatgcgctcgtggttgtaccagcgtatgtactcatcgaccaaggcgagcacctcgttgcgggtgtgttcctcccacttctcggggtagaccgcctcggtcttcatcctgccgaagaatccctccgcggccgcgttgtccggcgaacagcccttcgcgctcatggagcgcgtcagcccgaagcgttccatgagcccgagccatccgggccaccggtaatggcatccacggtcggaatgcaccaggggacgcgcgttccccggcagcgtcgaggccgctttctccagcatccggttggccagctccgcgttggggctgaagccggcggtgtatgcgacgatcttgccatcgaagcagtcgatcatcggcgagaggtacgaccttcccgtccctggccttgatctcgggtgatgtccgtcagccacttctcgttcggacgctcggccgtgaagtcccggtcgacgagattggcgggagccggcgtcgtctcgccctcgtaggaactatacctgcgtcgcttgggcacgtgcgccacgagcccttcctccgccatgatcctgcggaccaccttctccgatacgccggtcttgagcaccgccttgatcctgcggtacccgtacctgcccttggaatcggcgaacgccccggccacctctgccctgagtccggcgtacttgtcaacgccgagccgggcgtggtggtagtggtagctgctgggcgcgatggcgagcaagcatgtcatcgagctgagcgaatacgccggcctcaaccggtcgatcaacagggtcttctccctgttcgacaggcgccgcaggtcggcgccggggtctttttttacgacctccaccacctcccgcatcaacgcgttctccagctccagttcctcgaccctgcggcgcaaagcctccgcgtcatcatcatcggctgcggacggccggcggcgggagtccgcgggcttattgccctgcgcggagttcctgtttttgggctgcaacgcggccatgccgcccttgcggtacgccctgacccagccatgcaccgcgccgacgctcacgccgagctgtttggcggcctgcttctgctgcatgccgcccagcaccagctcgactgcccttcgcctggtctccagtgggatgatgggtttggccatatggccagcataccgggaatccatcgccagccaacgctccagacactgcctggtcggataacccagatgctccaccacctgggccgtcgtcatcggcgtggtgaaatacaactccaccgcacgctctcgttcctcaagactgaacatacgaaaatccttccgttcggtctccaagaaaacgtccgcagcccccttggtggctggccgtgtcccatgtggtttcccggcttaacgttccgggttatttgagggtgtgtagttgtcggagtcgttgctcgctgagccatgtctccttggaggggtcggggccggggttggccgcatcgacggctttgcgcatcatgtcgagggtcgcgaacgcgtagaacgcgctggttgtgctcatgctttcgtggccgagcagttgcatgatgagcggtagcggcacgccctgttggtagaggtccatggcgcgggtccggcggatcaggtggcagtggacgcgttcgggcatggacgggcacgtcccgcggcgtgctctggccgccgcggttttgaggatctcgtcgatccggtccacggagagcggctggatggcgccgttcctcgtcgagtggaacaacggcctgtcgccgtcgcgcatggacggtccgggatggaattcctcgaggtaggcggccaggtgggttcgtgtcctttctcccaggggcacgacccggctcttgccgcgtttgccggtgagcgtgaccctggccggcttatccatacccacgtccgcgatggtcagtgcggcgagttcgccgatcctggcggcggtgtcgtacatgaggatcaggagcatgcggttcctgcgcgatttggcgtcgccggtgccccatgcggtcagcaacgctttggtgtgctcctccccgaggtggtcgacgggtttgcgcgcgggtggtttgacacgtatgccggccgcgtcgttgcccagcgcggtcaatgccgggtgttcgaggcccgcgtggtcgaggaacacgcgcatcgtcgtcatcctcagcatgatggtgcggtccgagtacccgcgctcggtccgcatccattcgacccaccggcccaggcgcgcccggtcgaaatgcccgaaaccgatgtggctgcgctgcgtgccttccgtggtttcgagccatcggacgtaggattccaggccgatgcggtacgcctcgacggtcttcggcgagctgccccgcaccttgggcagccagtggtgcagccagtcgcgcgcgactcgccagaagtccggttcaccggagctggcggccgttttccttgccttgctcatggttcctccgtttccgggaccacgcgttcggcgtcggcgacgaggtccgcgtatccgtccatgaaatcggggctggcgtgcacgtagtagagggtgctgtcgatgccggcgtgtcccatgtaggccgccagatagggcagcatcgccatcacgtccacgccgtcgcgagtccaccgctcgatgttcgcgaacgcgaaccggtgccggaaatcatagggcctgggccgtttgccggcttgtggccactcgagcccggcccgcgtccagacgcggcggaacaccacgccgggcatgcccggggagaccggattgccggtggaggtgacgaagaacgcgggacggtcgtctccgaagcgttcgcgggaccgttggtcgcattccagcagttcggcggcgacctcgtcgcccacgggcagcctgcggctgcgaccggccttggaatcgaccacgtcgatggaacgggccttgtggtcgacgtgcccgacggcgagtctcctgacctctcgggtgcgcagcccgcagcaggccatgagcatgaagaacgcgcgagactgccacgcccacggcgacggagactccaacgttcccgcggcccgcaggaacagggcggcctcgcggtccgtcagcaggtacggcgtcggacgcggggatccggccttccactggtcggagagcacgtacgcgtcgggatcgtgggccagtcgcatccacctgccgaagtccctgatgtacgagaaccacgagcggcaacccccgggattcgcgtcgatcctatgggcgatccatcgctccacgacgccccgctccagacgcacggccccgtgttcgaggcaatgccggtcgaacgagcgcaggacctggacgcgggtggcgccatgcctgcccatggacgccttgaagcggatgtactcctccaattcgccggcgagcgggccgacgaatccgtgttccgtgggtctcatgacgatccgccttccggcacgggcagcacgcacgcgagcattcccccgcggtgcgtggccatgtagacgcgtgtggaatcggggtcggcgtggccaagcaccgcgctgatcgtcggcaacggcgtggccgcctccagcatcctcgtcgccgcgttgcgccgcaacagcctggaaccgccccggcgtccgagcccggcgtgccgcatgacacggctgatcgcctcgtacaccgatgaatgaccccgaagcgcgacatggggcgccttgtaccgcacgaacacacggtcgtcgtcggtggcgggcctttcgtccaacagccaggacgccagcctcgcggccagcggtcccgtcatcggcacggtcaacggattgcccgtctttcgctgcaccagacctatgctcatggaatcccaatccacgtcggcgatcctcagaccgatcacatcgcatgccctcagcccgcacgtcagcgacagcagggtgatcgccgcgtccctcgacggcaccgaccgcgaggcgcacgcctccagcaagcggcggtgctcgtcgtcgggcaacgttcccgcgatcgcgtgggtcctgcgtatgccggccaggccgatcgcgtccgccaggtcatcccgcccgagccatctgaacaacgggcgcaggtccgacgcggcgtgccgcatcgacgactccgaccagcgtgaacgcagcccggccaggaaccccagcacatgcgagccatccgaaccgtccaacgacacgaccccatgagattccagccacgtgaggaacaagcccgccatccgacggtaatgccccaccgtcgccgaagccagtcccgaaccggcgagatacgcctcccaacgctccatgaccacggccaaacccggaaccaccggctccgcaagcctgctcctgcgccacttgcccaggtccaccgaaccggaccgcagatacgagtcgcacaaacgcgccagcctgccgtaatcgaaccaccgctgcctgctgaaaccgcccgtccgctcactgaaggtcgacgcggcgaaccccgcgcccaacccacgcgtgtacaccgcatccgggcctccggcgtaccgttccaacgccctgatggacttgcggtactggcctatggtggattccatataaccggccccgtaaagcgcgcggaccacctcgcccgcgacatggccaaccgtcgtctcacccatggcaaactccttcgttcgaatcaaatgggacaagacgaacataacccggaacgttaagccgggaaaccacatgggacacggccagccaccaagaccccgaaccgttccccggcttaacaacaaacccggcttaatcggaatgcaccaggggacgcgcgttccccggcagcgtcgaggccgctttctccagcatccggttggccggctccgcgttggggctgaagccggcggtgtatgcgacgatcccgccatcgaagcagtcgaccggcggcgaaaggcacgcccttcccgtccctggccttgatctcactgatgtccgtcagccacttctcgttcggacgctcggccgtgaagtcccggtcgacgagattggcgggagccggcgtcgtctcgccctcgtaggaactatacctgcgtcgcttgggcacatgcgccacgagcccttcctccgccatgatcctgcggaccgacttctccgatacgccggtcttgagcaccgccttgatcctgcggtacccgtacctgcccttggaatcggcgaacgccccggccacctccgccccgagtccggcgtacttgtcaacgccgagccgggcgtggtggcagtaggtggccgctcggcgcgatgccgggcaagcatgccatcgagccgggcgaatacgccggcctcaaccggtcgatcaacagggtcttctccctgttcgacaggcgccgcaggtcggcgccggggtctttttctgcgaacctccaccacctccctcatcaacgcgttcccccggttccggttcctcgaccctgcggcgcaaagcctccgcgtcatcatcatcggctgcggacggccggcgacgggagtcagcgggcttattgccctgcgcggagttcctgtttttgggctgcaacgtgtatttcgtcaagtcggtgtttcgtgtttagtcatgtatttttttcgggtttaggcagttgcatgcattttccttatttttccggttgcgcggaggtgttcctgccgaacatgagggcctcactgacgcggcggctctggccggtgaactcgaggagccgcccgtggtgcacgatgcggtcgatgatcgctgcggcgagtttgtcgtccgcgaagaccgtgccccatttactgaactcgatgttcgtggtgaatatgatgctccgtctttcgtagctgcccgcgatgatctggtagagcaggcgcgccccgtcgatgtcgaagggtacgtagccgaactcgtccagtatgatcaggtcggcacggccgatgtcccggagcatcgtctcgagcgtgccgtcgcgtttggccttgcccagctggaggacgagctcggcggtctgatggaaccgcacgcccagccccatgtcgatcgccttcatgcccagcccgatcgcgagatgtgtctttccgcgcccggtcttgccgtagaacaccaggtcctgcgcgcgcgggatgaaaccgagccctaggagctcatcgagcatgtagccgtcggggagcctgacgttcgtgaagtcgtagccgtcgagacccttgacgacggggaaccgggcgcggcgcaggagcctgtcgtgcttcgcgcgttccctgttcgccagttccgtgtcgagcaggcggtggacggcgtcgacctggcggggcgtggcccagccggcgaattcgtcgatgctcgccttggagatgaacagcttgcgggccttctcgtagagcccttcgtccgtcttcgtgttcatcgcccgccttcctgcacgccgacgtccgcggtgaacgcgatgtcgtattcactcagatccggcctgtcatcgtcgtattcgatacccgccacgccctcggcgagcctggccgcgagcagtgtgacaccggcgcggtccgccccgccggtcgattcgaggatggaaagcatcgcctcgaccgcgttcgcccacccggattccctgtcaacgcgtttgagggtctgcagcgcctcgttgcgtgtctgtctgtcctgccgatccagccattcccgcaacgggtccggcaacgcgtcacgtacccggctgttgggccaggacgcgggcttgttgcacagcagcgccaactgcatggacgggtcctcgctgttcgtgctggcctggccgtacgcccgaggatgggtcgccagatgcttgcccgacgagtcgaggacctcgacctcgagcgcgcggaggcccacgatcacccctctgcccgcgttcgcccggtccgcggaataacgatgccgtccctcgagcgtgaccacgccgtaccggtcggccttcatatgccgccacgtgaccacgtcgaaacgcttcccgggcaacggcagcagcgccgcacggtcctcggagaacaggccacgttcctccgtgtccttgcggtaatgcggtttcgtggccagctccaggcaccggtccggcagcccggcgttaaagttctccaggctccatacgctcggccggggcacgaacagcttgcgccgcaccatgccgaccttggactccaccgcgcccttctcatgaccggaatacgggttgcagaacgaacaatcgaacccgtaatgcgcctggaaggcctggaacaggtgcgtcaggcgcggctcgcgctccccgtaccccttatggcccacgccggcggcgttatcgaacacgatccgctccggcacaccgcccagccactcgaacaggttgcgcaacgccaggcacgtgcactcagcgttctcgcccggcatcaactgcaccagaccgacgttcgaatacgggaaatcaagcacgaaatgatgcatccgctgcaccacgccgcgcaacagcacgtcgacctcgccgaaatcggcctgcgcctcgcctggatgccataccagatccatgaacgcctcatcacgctccgccgcgaactcacgcctgagccgcgccaccgcccgcgtcaccgtggacagggagacctccgcgccatgctcgtccctcaaccgctcccagatcctggtcgcggtatgccgctgcttgcgccagttcgcgcgatcctccgcgagccactgctcgatcacgggcagatacgggtcgatcaccgacgcgcgcggctttctcaccgacggcacggccgacagatcctccttcgcgaggtacttacgcaccgtcggctcgctgacatgtgttttccgcgcgatcgacgcgacggattccccgttccgccgcaaacgacggatagactgtacttggggcatgctgatcataatcctttccggtcctttctggcggagatacaagcaccatccagttaagaccattccgtggtcggcatgctctgcctaaacccgaaaaatcatcgtgactaaacccgcaacaactaattgaacacaaacactgcaacgcggccatgccgcccttgcggtacgccctgacccagccatgcaccgcaccgacgcccgcgccgagctgtttggcggcctgcttctgctgcatgccgcccagcaccagctcgactgcccttcgcctggtctccagtgggatgatgggtttggccatatggccggcataccgggaatccatcgccagccaacgctccaagcactgcctggtcggataacccagatgctccaccacctgggccgtcgtcatcggcgtggtgaaatacaactccaccgcacgctctcgttcctcaagaccggacatacgaaaatctttccgttcggtctccaagaaaatgtccgcagccccttatcaaaagcagctggagtcgacaatcaccttcaatgtcaaaatgctattgacggcttatggttattcgcagtccagcttggccgaagcgatgggaattggccgttcggccatgtccctaaagatgtcggggaaaacaggctggtctgtatacgacctggttaatgcatcaagattcttgaaagtaagcacggaacaacttcttgatgattctctgatgaggagaatgggcgtttcggacgatgcggaggcggatatggaaaagtccgccgtttccggcggactttccgatgatggtaccccccgtcggagcgcgcctccgcggaggcactcgagaacatccacccgttcgccgacgacaacgggcgtaccggacgccagatcctcaacatgatgctcatgcagtgtgttttagcaagttggcgtccgctttgtgagcggtgtttttccgcagtgtaggcagcgggttttccgcagggtgtgcggtatcggccgctgcctgtctgcgttgtgttggttatttggtcatgagggcgtgttcgcttcggtaggagcggccctcgaatctgatgagccgtccgtggtggacggtgcggtcgatgagggcggcggccatgttcttgtcgccgagcacgcgtccccatccgctgaattcgatgttggtggtgtagatgatgctccttgtctcgtaggaatcggaaatgatctggaagaggagcctgctgccctcctcgtctatgggcaggtagccgaactcgtcgatgatgagaagtcgggccttgccgatgctcgcgagttcccggtcgagccggttctcctgctgggcgcggcgcagacgcatgagcagtccggtcgcggtgaagaagcgcaccgggacgccccgctcgcaggcgagccgtccgatcgcgatggccaggtggctcttgccggtgccgacgggcccgtagagcacgaggtcctcgcatccggcgacgaagtcgaggttctcgagctgcgcgcgcccccagtcggcgggcatcttcaggttggtccagtcatagccgtcgagggtcttgtcggcggggaagccggcctgtttgagcaggcgcaggcgtttggatcgctcgcgcgagtcgagttcggccgtgaaccatcgttcgatgaagtcgagctggttgggcgtggcctcggcgagcgtgccggcgagcacgctgcgtgtcagggtcaggctgcggctcatcttcaggatgcgttcgcttttctcggtcgtggacgcgcgcctgcgtcgggtctccgggatcaccggatcgggtctgacgctcaccgttcttcccctccgtcgtccgtgccggtgatgaaccggtcgtagccgctcaggtcgggctcctcgatcccgccggggtattcccactcgccgtcgcgcatgcgcaacgcgataggggtgagcgtgtccgcgtgcaggcccatgtccctgttcgagcgcaggatctcgccgcacgcctgcatcgcgggatcgaacccggccgcccggcacgcgtccccgatcgctttgaggctctccctcaacgtcttttcgtccatggaatcaagccacgcgcgtatatcgtcgggcacgtccgggcggatcgagctttcccgccacgcgcggggtttgaccgcgagccggggaagcacgagcgcgggatcctccacattgcgcgaccgtccgtactgtctgggatattccgcgaggagctcgccggtggcgggcgatgcgagcgtgaccgtgtcccaccggatcgcggccggcaccttggaacgcgccgaatcggggccggcgaggtaccggttcgagtcgatgtcgaccagcccgtacctgtcggccgtccggctttcccagcgaaccgggtcgaacgccgtggacggcaacggcatcaacgcggccctctcctcgtcgaacacctcggccacgggcacgtccggcaacctcgggcaatacgagtccctggcgagcccgtcgcaccgctccagcaggagacggctcaactgcccgtacgattccgcgcgcatgggcggcaccatgagattgcgccgcaaaaacccgaccgcgttctccacgctgcccttctcgttgcccgaatacgggttgcagaaccggacctcgagccggtaatgcgccacgaacgcggagaacaccccggtcaacgcgacctcgcccttcgcgttgcgccggccggcaccggtcgcgttgtccatcacgatcacgggaggaacacccccgatatgctcgaacacgagcatcaggccatggcacagacactccgcgttctcgcccggcaacgccacgcacaaccgcatgttcgaatacggcaacgagaccaccaggcaatgcacgtccgccatctcgccagcgatccgggcccgggccacgccgaaatcgacctgcatgctgcccgccgcccactcgagccgcacgtacccctcgcgatccggcacgccgcggttcgcctcgcgccaccggtgcacgtaacgcatcgtggtcgaatactcgccgtcgtagtccgtctccgccagcagacggtcgtgcacgcgcctgatcgtgtgccgctgcttcctgggcagcagacgatcggcctccagccacccgtccaccagatgcgcgtacgggtcgatcttcgacccgtacctgcgatccgccttcggcttgggcgagcaatcctccatatccgcgtacttcgcgaccgtcccgcgatccacgtgaagacgccgcgctatctgcgcgcgcgacattccctgccggtcgagtctcctgatatcttgcacaatgggcatcggtatcgccatgttcctttccttcccgagcaccggccggcggcaaccggccgaatcaaaaccgaatcgcaactcgggaatatacaggcggcggcaccgatgcctctcacatcaccgggaaacgatgacgacaccggggaaaaccatcagcccacactgcggaaaaacactgccgaacctgtcgaacaaacattgaagcaaaacactcatgcaggcggggtacgagcccatcgccatcaggcatgatgccggcagcacctacgccggacggctcgagcagtggcaggcgtacggcaatccggttcccctggcgtgcatggtcgcggactgcgtggtccgggaacagtgccggatcgggaagatcgtgtccgatatccgccgcgggcatcccatcgccggacacgccagaggtatacgtgaatagtgtgtttacacactgttcgagaataataccctgacatgtcaactaacgcaacgtttactgggatgacggacaagaaggttggttcctatcagctcataatgacgttgccgactgcttgatggtggttgtggcgcttgtttgttcgattccgccggtgctgggtcgttttcgtctggctgaacggcggccaatctgggagttcgttctggtagacctcgtcgggccataatctcccagattctgcgggagtttacgctgacttcgggaattcgccgctgaactcccgtgccggacgcgggagtttacgagaatccggtactctcatgcataatctctcaacaaaaacgttggaattccgcgattctcaaaaatcgaccttgaagccgttcccgggagaacttcgccggattcatgtttcgcgctaaactcccgcgcgcatccggaagttttcatagaatcggtcgcgcaaacggacatccggatttctcaatttctcccgggatcagcctcttccaccgagttttccagaccacaatctgaaaactcgtgatttgagcctgctgaatcgagattttgagttcttcccaaactgactgccgcaaactgaccgcactcatcgtcctgtcagcgcagccggtttgcggaatggaagacgtgtgcggagagcagcgcgcagcggtgcatagtccccatggttggtggccgtccgcggctactccagcggtgtgcgatcccactggtcggcgcgtggaatggtgcgcaggctgcgcgaactgacgattagcagcatactgacgagcatcaccgcccagaacaccagcatagtcccgctgaatccgaaagcgggcaacagacttccggccgtcgctgagcagaacgcggacagtgcctgggccggtacggtaagcgtcacggtgatacgcccctgcatcgtgtcgggcgtcttaccgaaaatgaacccgagctgcaacgcgttgatgatcgggaacggcaggcacatcacggcgttggcgataagcagcacccagtagttgtcggtcagcagcatcggcagcgaagcgatgcagatgaacacgaatccgcagcatgtcaccggcccgaccggtgcggtatcgctgatccgtccggcgatgaacgcacccgccagcatcgcgaggaatacgcccgtattcacgaatccgatgagcgtcgcgttcacgccggtgcgcatcagatgcagctgaatcgcatactggaagccattgaccccgaaattcgccagcgcggacgacaccatcgtcaacaccagcatcctgcggtgcagcgaccacgaccatccttcggcgaaatcacggaaaaatgacgcgccgcccgctttcccaccgtcatcgtcgctatcgccgttgccgctatcgctgccgttccgcggatttccgccgactcggatacgtgtcgcagccacgcctgccagcaggtacatgaccgcagccgacaggaacggcaaccacggggcgatgccgtacagcaggccgccgactgggctgccggccatgttgatggtcgcgtcacggccttcgttgagactgcgcgctttcggatatgagcgaatatcgacgatggatttgagcatcgcatccgaggcggggccgagaaacccgttgaccgcagactcgaacaccgcgatggcaagcagcacggggaagaccagcttgccggccatgagcagcgcagcgactgacccccaacagatgacgcccgctgtcgcgttcacgatgatcagtgtcttgcgatcgtgacggtcggcgaatgtcccgccgaacacggcggccgcctgctgtgcgatcgcggccagcgagcccaaccaacccgctgctgtggtcgatccggtgagcttgtatccgatcagagagaccgccagataccgcagggccacgccgatggccgtcgcgctgtccgccgtgaaccatggcacgtaacctgggatatcccacaacctgctttcgcgcacaggagcagaaacgagctttaacgaattactcatctaataatttatccttaccctaccagtactggaatcctacagaagattaggcggcactggttctttacaaacttgctcagtatgccaagcataatcatatatatcgaagtaacccttttctccataatgagcaggacagcaatgacatcgataatcttcaacctgttccgctaccaacgatcccaatgttgaacataatcgatagctaagcttaccggactcatggtgcagcaatagcttgcctttgattgccaagtgtgaagaaatatagtcatatttattgttcggataatagaattcaggcaaacttaccgaattaccaaaatagcctggattaacaatgaacgctatatctttcttatcacatgagtagttaatcatccttgcgacttcggtggtgcttggaacgtctgccgcttgaattactaagttgattttctctcggtcaattaattcatcaagttcactatgacaagttatcattttatcaatgctatctatagaaagacatcttgacgccctggatttcagcacatcaacctttttcttcccaatgtctgttcgcacgtaatcctgacggtaaatgttgtctacagtgacaacatcatgatcgaccaaagtaatatgttccaaagcaagcattgaaatgtgccgataaatatgacttccaatagacccgcatccgagcagcaggcatctaatttgtcgcggctcagcgtgttcgacacgcaatacgtccaaactgacaagtttgtcaatagccgctggggccggtaacgttttgttggactcgtggcataatcaaaccatagaaacaaagaaatccaataaagcgacaccgtatccaagtgcccacctctatttgacggaatgcaccatattccggcaccgacgaacatcaggatcgagccccatcaccaatcggcgccaagccgcccatatcccatgattagctaaagatatctctgaatcacagcgttcagaaaggaggcgccatggaaaagccactgcttctactggccttggtgccgctggccgtcggattagtcctgatatacgtcgtgattggatccaaaaaccgggaagagaacgccaaaaggactcttttgcgtgtcttctcagcgctcatggtcgttgccggcgcgttggccatcgcgagacaactcgtatgacgcttcacgctgcggcatgttgtcccggctattgcccatgcccattcccagctctccgcgccattcccgcaatcacgtctcttccccggtctcaagcccatgagacacttgaagccatgactaccattatcatgtgcacctcgcatgataatcctagccaactgttttttgctttattccaaggttttcgatttttgggagacctgccggttacgctcgttttccacgaggcacctacaggcacccaagaataatctcattcttctgtgcatatcagcggcttaccgacgcacacgaaagaagcatgcgagtgttcctgcgacctatctcagatggcgaagccgctcgatcagatcgacgagcgtctgttcctcctgttccacgcagtctaggaaaatggagcagaacgaatccggcttgccgtccacctgccatgcctccaggcctcgcgcatatgaccgacccgcatcgtatttgatggccacgggacggtatccgttccgcagcagcacgaagttgagcagctggcggccggtccgcccgttgccgtccatgaatggatggatgttctcgaacatcgcgtggaaaccggcggccctgagcagcggatgcgctgcgcagccatccaacccatcgatcaaggatcgcaggtcgtcgcggatctccagcgggtccgcggtcttgactcgggtggcggtgatccgcgccaaatagccataaggacggaacgtgccgcgggcgaacggctggagatccaatgcggtcacctcgtgtagacgacggatcagctcctcgttcagcttccgcccctccttggcatattcgcgcacgtaggccatgccgtcagcgacccctcgcgctgcgaacacgtatctggccggcgagtccgatgggacgaactcgccctccaacaccagcgacgtgtcctccagggtcagcgtggatccctcaatggcgttcgagttgtaggtgtaacgcaccagccagtcgcggtcgtaatccgccaacgccatgtcctcgacaccgtccaacggctccagcgagcgggcccggtccttcagcgcgtcgaccctccgcaggtgttcggaaatctcccgtcccccttcaagggcgttcagctcgtcgggaagggcctggatgtgccgtgacagctcgggattggccatcatgctcctcttttcgtgttccggttgcaaagtccattattccagtagtgattcgttgcgctagcggttcagatgacggctcaacgcatccggtccggttccgacgcttctggcatccccgtcccgttgtccaaggttcttccgcaacgtctcgccgaatctgtccatcaaatccgttttattgcgaatcgggtcagaaacacgaaggacctcaccttcgctgattctgcggagcatcccgatacgctttaccaactgtacccggatggcgtcgaggcgttcgggcgcgaacatgcgcatgcgcgacaactcgtacgccacctcgtcgggccagtccgacagagcatccaggtcgaaccggctccaatcctccaccagtctgagctgccgcaaagccgagggcttgccggtcgcggtgtagaacggcttggcgaaccagtcgcggccgtccacatcgagctcgccgctccacaggctcgcgccagtgtcgtagatcggggccggacggaccgcaagggtctcgatgttccggatcagaccgaagttgctgtaatgcctatctgtattgcgcatgaggtagtcgaccacgagccaatcgtccgtggcgtcacgaaccgcccgttcgtctgcgccgaagccgacggcggcgcggatccactggtcatgcgagttgaggccgttgacggccttgacggattggagcacctgccaggcggagaccagctcctcatgattggagagcatgtccgcgcatgtggacaccagacggttgccgttgcgtgccagggaataccggacggccggaacgcccaatcgcatgcagagcctcgaggcgatgacctcgttcatcggctcctggccagtacggcccgacttgacgagcagtctcctgccggtggccctgtcgatcgtccagcgtttgggaagatcgccgctagtggacacgtcggggacgttgaggctgatgtcatgggacgacgagtacgaggtgagcaggatctcgcccagcgcctcgtcgaaggaattgtcgaagaagttgacgtccttccattcggccgggtcgtcctcgcgtctgacccagtactggtccgacaggctcagcccgtaggtcctgtcgagcagttcatcggtcgatgccgcgccaagcgattcgagcacgcggcggatgccgtcgcgggtggaggggatggcgcgggacctccaccattcgtcgatcctcttggcatacagcgcgctcttgccgtgcgtggtgaactccaggggcagacgatcatggtcaaggacctcgccagaggagcacgcgcgaccggactcgggatcgtattcgaacgcaaggaccggatggtccccgcacatgatcagcttgcgtggcatgattccgctccctccaaacttggtctttaaagattctacaggcacgaattacgcgcgagacggcgtcccgtttcatgacgcgatgcatggatatgggccacttccgcaaatcgcaagcctcggcgatgacgccgacaactgatacggtagtcatattggtttcccaaaggtaaagaggcatgaccatgggattgttcgacttcgctaagaactctttgggtgacgtgccgtccggcttcggcggtcggggcgatatcgccaaccatcttttcaacgaccgatgaaaaggctccggttgaaggctatggtatgatgacacgagcgtgggaatttatgaccgaaggatactcacataaagcggcacacatcgttgagcatatcattctcgcaatcgcgctgatctgggctggaggctgcactctcatatggatgcaaacggatatgtcgcatcgcatcgtgaacgcgaaatccgctgacggcacctgcgaagtgaccatcagcgaactcggctcgcccatattcttcggtccaagcagcatcacggtcaaagtctcttgggacaccgatcccggtgttatcggttccgagaacgtcacggaaatcaaaacggatctgcacaacgacggcaaatcattaggctcgggcaacttcaccgtcacctggcacggcaacatcccgaccgtcaccacccatggtgaggaacagccggaccaaagctacacattcaactggaaataaccgctccgaacatcatgtctctcccgagagtagtcctcacaaccgggcaggtcccacaaggagcatagctcatgcacccaccgaccggtctcaagcacatgagacacttggagccatgactaccatcatcatgcgcacctctgatgataatcgtggtcagctgtttttggctttattccaaggttttccatttttgggaaacctgccgattaccctcgtttttcacgaggcacctacaggcacccaagaataatctcgactgcccccaccggccgaccaccaccggccggtccatgatgctcattcgagatctcccgccgacgataggcgcccggacccataccgtctatccaaggggaagccaatgaaggacacggagaacaggccgcaaccgagaaaacgcaggaaatggggatcggtgatcgtccgcagggacgcggacggcaacccgaccagtttccaggcgcggtacgtcaacccgctcgacccgcccaagaaggtcggacggaacttcggcctggaatacgagacggaggcctacaggtggctcgacgaggagcgctacctcgtcacactccacaacaaaggcatcaggcaatgggttcatccatcgcagcgaggcgcaaacaccatgcccacattcagggaatactccaaggactacttcgacaaataccgcaaaccggacggcagcaagctatccggccggtccaaccgatgcaacggaatcgtactgcgtcggctcaacgagacgttcggagacaccccgctcgaccgcatcacccggcaaatggtagacgaatggtatgcaaacgccagagacacgttgacggcatggacgttcgaacaggcggcgcgaacactcaaacgaatcatgctcgccgccgcgaacgaacaggcggatggcaccccgccgctcatccccgcgagcccgtgccggtaccgcgtcgtcaaaccgcaatccaaacgacgtgaccaaccgccggtcaccgccgacgagatcaacaggctggccgagctcttccccgactaccagcggctcgcgctctggctctcccttctggcaggcggactgcgcctcggcgaggtatgcgcactgcaactcagggacatcgacctggagaacctgcaactccacgtccgccactccgtcaaccgcggccccgacgacaggggcaaataccaattatgcgagcccaagaccaaaagcagcaaaagggtcgtgcccatcccgaaaccactcgtcccgctcatcgaggcccatatcagccggttctgcaaggaccgcaagcccgacaccatgctgtttcactcgcctatgctggacgattggctgctcccgcccacgaccatcgaacggacattccgcatggcccgcgaaaagatcggacgccccgacatcaccttccactcgttgcgcgccacgcacgccaccatgctcgtcctcgagggcgggaccatgcgcgagacgatggacgacctcggacacaccagcctcaccgtcgcggtggacagctaccaacgggtcgtcagagaacaccaccgcgacaccgtggaactcctcgcctaccggtacatgccatcgaacgatccgaccgtaatccgcacggtcatcgatcagaaggaacgccagatcgacaagctccgggacgaagtggaaagactcaggaagatcctgctggaacgggataccggaataccgacggacccggacaccgttttaccgaaaaaccaaaaccggtaaagaccggcatcaaacggaacagcctcacacgtctaagtgttgcaacaagtacagcggcaacgcttaaacgcgtgaggcagccacgggttaagggtcaaaatgtgtgtctggctcggcgtgtcgcgggggttagatttggcctttttgaatgccgattgagtgggtgtagtcggtgtcgatagcgttgtcgtagagggctgggcgtcctgtttcgtggtcggcttggttctcggtttgggtcagggtggatactttggcgagttggccctggccccagtcggactgcctggcgattcgtactggatcgtcaggcagttccgtttttaagtagagccaccaatccagcatgcggcgttgtcgttcgcctgatctgccgcggtgggttctggcgagcagtttgagctgggcgttgatgccgccttctaagctgttggtggtggatttgatccgctcgggcgcaaggactcctgctggcgggttgaggtagacaaacagcatctcggaccgccaaagatggttgaggctgttgtaggccttgcgcacgttgtggtgggtccacacgcgggtccatgcacctgttttggggtctttgatcatggttttctcgttcatccattcccggtagatcgttgaaaactcgtgcagttgcacaccccacgcggcggcttcatccagtgtggtgatccgggtcagtttcagcgcaagtcggtagatggtgcgcccggcatcggtgcgtgggttggtggtggtgtagcggcggaccacgcgttgggcgtggatgaggcagcgttgaattttcgtagtcggccagcactttttgattgcgctgtatgcgccttggccgccgtcgatgacggcgatgagtggggcttcgatgcgttcaagcagcagttggtagtcgcgggtggtttcgtgtttgcaccagtgccaggcgatcacgtggtcgatggtcgccgcgacgatcaggcagccaccggcggtgtaggtgccatcgagaaatacctggtcgtagatccgcttgtggtggccggcggtggggtcaggcacatcaacgagccagcaccacttgaagcgccgcttcatggtggcgcggctaacaccgtttcgtttggctaggtcgtcgagtgatattgcggtggtgcaatgctcgatgaactgggtgaacactgccgcgttggtgatgtcgtttcgacgtttgacgctggaggcgccgcattgtttgcagcgccatctggtggtgcctttgctggtggtgccgttgcgtttcatttcaccgccgcagtggcagcgtggttggttcttcgacattgcgacaccacaccacgccgcgcatagcacatcacggctgccacaccgaggatttcccgtcgggggctagatatatgcttccggagcatatactttccggaaacctacaggtcaatccgtgaaaatccgcgattccggacacactttttgacccttaacccgcagccacggtcgaagcgcgaggcaatgccttcaaccgactggataccgcgataccggaaccggtaaataccgaaaaaccgagataacggaaccagttttcagccctcggaatccattaccgtacgacccttgccgaagagatggtcgacggtattagtgttgtgcatgaggtagttttaggatcagacacattacggacaagataatgagtggaataaaagaaacctttggtttaatttctgaagccatcagcactatggcggaaagcggcagcgactggccctacactttggcaggagcccttctccttctgactgttgttgcgcactgtgccattaagatatcaacttggattggagacaacgcatattcaagacagcagaagcgtctttcaagactgtcatctcttcgcgaggcaaaaaagagtcatcctgatgtgcttcttgaagctgaaatcgacgcagagaaagcaaaagtgaacagatacgatgcatggtgccgttggcgccaggaaaaagcacaaaaacatcggaatgaactaatcgagaataaaacgtctcgaagaagagacagcttcttttttactcttttttctcttctgctccttcttatcctatgggcaatacccttcttgctcaaatgctcgggattgctttcccctgaggatggcagcgctttaagcaatattaaagaggaaaatttaccaagtgtggttttcctcttagcctttcttgtcctgccgacaatctggattcctgtatatatcgttgcttaccgtttataccgggccatcagagaagcaaataacccaatatcgatatgggggttttcctggatgtcggcatccatgttgttctcggcgatgattgcagtgtcaattgagacagccacgaaatatacggccaaacttttagccagggagctaatgctagtggcaatcgctgccctatttgttcctctaagctttgccgcgggatatgtcatcgattacataatcgatagatggagattcgctaatcgtccgaacttggaagatcattatcatgattcattatcttctcgccggaatcgctacatattggccatctttaattttgtattctgtctgtgcctttccatcttatttgaagtgttttatttcgaatcgactataaataatatctacgtattagtagtgtttgttgttatcctaagccttgcggctttcctctcaatcgtagcttctctcctttgtattatttctttcatctgcgaggatgagtttgccctgcacggccatcatgtgatctttcataatggacagaaaagaaaagacaaaataataggctatggtctttcagcgaaaagcacgtactatcagccttcaagccggaggagggaactcatctttgaaggatggaatacgcaagaagacggccacggcgtaagcataagaaacgcggatgattttgacgcgatggttccaaaagacaaatgcggggaaatcaaactatatgcccagtggaaatcagcgacgagataggataaggaccgccgccgacacccgtaggggccaggggtgagcatctcatcgcatacgaagaccctcgcccctgcgtatggccgaccgtgtatccccgaccatgaatgttgcaacacttagacaccatggaacatgcacgatcggatagagactacggaccggctaccggaactggtaaaagccgaaagaacgaaatccattctgctttcattcttttacgccctatgcacgccaagcgccataacaatgtttgcgatgaacttatcgtatgacagtaacgccgatggttcataggccaccccgtcctcgggattcgcaaacacaagccagatggcctggtacaagctctttcgacggagtcggtcacagagcagcaaaaaacgatcaaggtacgacgcaccctcgaaatcagggtcaatcggaaaatgcgctgaccgcaccccacgtccgacaatccgactgtccggacaatcgtgaactatcatcacatagcccatgaccggcggaatactgctggaaccgagcagatgctcatcgaacgccgtatgcgcgtcaaatgccgagccaattgattcctccgcgcggttgttggcgttgttcccgaaggaactgttaatgctcttcaattcgatagcgctcacgagttcgccattgtcaagcgccagcaagtcccagttcttggtgggacggaaccagcccggtaatgtgcacatgcgtccttggtcatagacctcatcaggatggaatcccgcattaatgagatcgtcacgaatgatagctgcaatcggatccaggtgctttccagacgtgattccctgccgtgctccctgatcggaatgccctgctgcagcctgtgcctcgcgggcgcgttcgattgagtcgtacatgccgagaatcgcgtcctcgatgtcaaatctcattccgtggcctccttataagccgcttcggcgaatttcgttgccaaagccctgtccttctcgttaaaagcgcgtgaaagtcccaatttgttcgtgtcacttatttggatatatttcggcatatgcaccaagcgcaggtactgtgcctgaaagcgcaacgttcctccacgcatcttgacaccaagcgcatcgatgaaacgacgtgtcgtatcggccataagcaggccgccgagaacctccaaatcccactcatcggaagtgatccagtagcagttgtgatgcggatactttccatgcgacagaatcggatcgggctgagccgccatatccggcataagtagaaggtcgcggtcaagcagtccaggtgtgagcttgtcgatagtgcggtaccaggcagttttattctttttcgcgacgtaccgtctcgacagccgttccttgtttgtttccaaataggttttgagtcgtggatatttgtcgaggttgaccaaagttccgtcgtcattccacgggtttacaagccagcgttgcctatcgtcgttcccacgacgatgatcacgcatgtagaaaatcggcaccatacgatcagactctaccaaatcatcgtcttcagtaaggaaaacatcatcacaacccgtggcgataccgataccgagtttcacgccggcctcttcgagtttcggcaacctttcacacgcctgcgaaacgaatctcactaggtcatgattaccgagcggatacatcctatcaccggtcggtttatcaatctcgaatgcttcaaatcgctcaccaaccagatccggctcgtcgtccatcagccagtcgaggaccgcggtggcgtcggcctcgttgaattccggggcgcagttcacgaatttcaaatgatcggccgccacacccttgcgaaccgtcgtgaccgccggataggcatcgacctcatcatcgaaggcatcaacgccgtgcatgcgtacgagagacacgagatcgcaatccgtgcccatacgggatctcaacaacgtgccgtacttgttctgcagccatcggtcggcgcagatgaagcatagcgttccgccgaccttcaatgtatcgaggcctcggtcgaagaaactcacgtacaggtcgcatcccgtcgttaccgaagagagtcgtttgacgtaaagcgacctcttcgtccggtcaatttcaacagcccggacgtatggtggattcccgacaataaaatcagcggcaggaacgtcatcaagaatgaaatcgccatgtacgatccactgctcgcaaagctcccgagcctggattgcggggcatcctcttgtcatcaatgcctcgacggcggccttccttgccgtctcgatcgacgcggagtctatgtcgtaggcgcggatcgcgttccccaacgacgtccaacctttgccaacggcaattgcatcatcggccagacgtccggcaatcacggtcaggaaagctccgcacccgcaggatggttcgatgatcaccttatccgaaatgccggtgcccggcacatagccggccacgtcgagaatcaggtcgacaacccattttttcgtatagacaacaccgtggtgcgtagatgccataatcctcctggaatcagatactcctcagtatcacctattagaaatcgacaacgagtatcggcacgacccgtgaaacgctgttctcagctgaccaaacaccggaatccccagcatcacttccgtgggcgggaggctatcccttagcatggctgcgcgagcggaacagaaaagctctccgcgcggcgtcgcatctcgaattcagatatagtttcagttccgaacatcacgccactctctttctccctgattctcatttcgtggcccagggccttcagcctaatgacccatatggtgcctaggacctttgtaatcaatcccggcactcttgacatccccgtcttgccaggcaagattcttccgcaacgtgtcgccgaatctgtccagcagattcgtcctgttgcggatcggaccggacgtgcgaagggccttgctctccctaatcgtgcgaatcgttccgatgtgcttcgtgagctggtcccggatggcgtcgaggcgttcgggagcgaacatgcgcatgcgcgacagttcgtgcgccacctcgtcgggccagtccgacagggcatccaggtcgaaccggctccaatcctccaccagtctgagctgccgcaaagccgatggcttgccggtcgcagtgtagaacggcttggcgaaccagtcccggccgtccacgtcgagctcgccgctccacaggctcgctcccgtgtcgtagattggggccggacggacctcaagggtctcgatgtcgcggatcagaccgaagttgttgtaatgccggtcggtgttgcgcatgaggtaatcgaccacgagccagtcgtccgtggcgtcgcgcacggcgcgctcgtcagctccgcagccggcggcggcatggatccactggtcatgcgaattgagtccattggtggttttgatggattggagcacctgccaggcggagaccagctcctcatggctggtgagcatatcctcgcacgtgcagaccagacggttgccgctgcgcgccagcgaatacgggacggcgggaacgcccagccgcgcgcagagcttcgaggcgatgacctcgttcatcggctcctggccagtgcgacccgacttgacgagcagcctcctaccggtgttcttgttgatcgtccagcgtttgggaaggtcgccgcccgtggacacgtcgggagcattgaggctaatgtcatgcgacgaggaatacgaggtgagcaggatctcgcccagcgcctcgtcgaagggattgtcgaagaagttgacgtccttccattcgaccggatcgtcctcgcgcttgacccagtactgatccgacaggctcaatccgtaggtcctgtcgagcagttcgccggtcgatgaggcgccgagcgaatcgagcacacggcggataccatctcgggtggagggaatggcgcgggacttccaccattcatcgatcctcctggcatacagcgcgctcttgccgtgcgtggtgaactccaggggcaaccgcctaggatcgaggacctcgcccgaggagcacgcgcggccagacgcgggctcgtattcgaacgcgaggaccggatggtccccgcacatgatcagcttgcgcggcatgcttcccttcctttccgactcggcgttacagagaataaattctacaggcgagaatcgaacgtgggggcgtcgccgtcatcgccgccggcttcgtcgccctgctcgtcgtcgtcgcgcttgcggtgggactgggattccaaggccttgtcggcacgtgtgcgtatcagccccgcatacttgccggtgagttgcggaatggcaatctcgtccatgcagtcgaaaccgtaaccatgatcggagtactcgctgtcggcacagataatgttgcggcgcgtagtctgatcgacgagcaaggcttcgagcacgtcctctccgtggcgttcgatgaatttcccgatgatgtcagccattaagcctcgcttaggtatggttctgaataagacttcccgatgggcatcctggaatcagcgccccatatggcgtgcagggcctttgcgatcggtcccgatgctcttgccatccccgtcttgccggtcgaggttcttccgcagcgtgtcgccgaatctgtccagcagatccgttttgctgcgaatggcgtccggcttccgacgcaatccctcgaccagatcgatgaacgcgtgttcctcctgttccacgcagtcgaggaacacggaacagaacgccacgggatcgccgtccacctgccaggtctccagactgcgggcatagtcgcgcttggcgtcatacttgatcgccacgggacgatagccgtgcttcagcagcatgaaattgagcagctggcggccggtccgcccgttgccgtccatgaacgggtggatgttctcgaacatcgcatggaagccggcggtcctgagcagcggatgagcgccgctcgcgtccagcccgtcgatcagggcccgcaggtcgtcgcggatctccagcgggtcggcggtcttgacgcgggtcgcggtgatccttgccagataaccgtaggggcggaacgtgccgcgggcgaacggctggaggtccagcgccgtcacctcatggacgcgccggaccagttcctcatccagtctcctcccctcccgggcgtattcgcgcacgtaggccatgccgtccgcgacgccgcgcgcggcgaacacgtaccgtgccggcgaatccgacgggacgaactcgccctccaaaaccagggacgtgtcctccagggtcagcgtggatccctctatggcgtttgaattgtaggtgtagcgcaccagccagtcgcggtcgtaatccgccagcgccatgtcctcgacgccgtccagggggtccagtgcgcgggcacggtccttcagcgcgtcgattcgtcgcaggcgttcggcgattcccggctcgcgttcaaggccgagcagttcctcgggcagttcctgtatgcgctgcgatagctcgggattggccatcatgtccctcttttcgtgttccggttgcaaagtccattattccagccgcggttcgttccgtcctgcggcctgcatgtcatagggaggcgcgccggccgtcccgggtcgattcgaacgccgcggccacctcttccgataccggcatgcgcatcgtcacccggccggtttcctgcgcggcggcacgtttcatggctcggcgttcggccctggtgggccgttcgagaatccactcggcgaacgcgcggataaggatggacgcgacgatcacgccgatggatccccagaaacacggggcaaagtccggcttggagtggtcgtaccagaaccagacgatcaacgcgaggatcagcgccaggccggcggcaagggcggcgagcttgtggaataccaaggcgagcgtgcggatgggatgcgtgaccagtcccaccgcaagcgcgacgacgacgagcagggcgacgaagccggcggcgatgatggcgatgcccaggtatatcgcgagcatatagagtccgaacatgatcggccttccttccctcttctattccgtttcttcgggcatgtaggtgtagtcgacggcgacgccctccgcctcaagcagcacggcggcctcgcgcacggcggcggcgcggcgcttcacggattcctcggcccggacccagtcgggcagcccctcgggcaggttggagacgcgggagaacgagagcacggcccgctcatctcccctgtgtcgttccatgatggccgcgacggcgcgcctgtgctcggcgagatagtgttcgagcatctcccgcattctccccgagggttggatccggtatttctccgactcgtatttcttgaccatgtccacggtgaggttcgcaagcacggccgcgtcgtgctgggtcatgccgatgcgttcgcgcgtcgcgcgcatccacgccttggcctcgctccaatcctcttttgccatggtccctcctggatataagaaagccggatccgcctgcgcgaaccgtgattatacttttagtataatcgaggttttctacagggcggacccggcgtttcccgggacgcggccgtggctgcgccccggtttcgtcactcggtcggcatcgatggattatcgtcggccgtggccttgcgctgctggtcgagcatctgctgctggatgagcacgctgcgggtctgtgccgtgtactgcttctgggccatgtccatgctttcctggtggcgttgtccctcgacgtcggcgaagacgagccgctggatgttctgcgcgagctgcatgagcttgtccttttcgaggatggacaccttgacgctgttcctgccgccggcctggttgacgaagtcaagctgcgcgctcatcgtgttcgcgaggttcgaggccgcgacgaggatcaggacgagcgcgacggccacgctgctgtcgaggcatccgagtccgatgagcaggaacacgacgccccagacggggcttccgaggttgaacttcgtgctcgtgtcgaccgatgcgacgttgcgcaacgggatggtcttcgtgtccgcgccgagcgggatcaggccgaacagggtgttcggggtcgtgtattggatgcgggtcgagcttgcggcgatgctggtcttgagccagaagatgatcacgctgggactgaaacggtccccgatgatgttcttctcgcctggcgcgaacgtgaattcggtcatggtctactgtgtttcggccattgtccgttctctccttgtttttctgtgttgttggttggtttctgtcggttgacgggaagtttgcgtgtccgcccagtttgagggcttgttcgatgcggtgcagccgtaggtcgagttcgttctggcgtcgtgcgatcgcgagggcgatgcgcatggtgcatgcgtggtcgagcatcggatcgtccgtgcgctggcccgtggtttcggatttgtcctcgttcatgggactgtcggcctttctatgggtgggatggttccacgagcgtgagttcggtgacgagccgattgacgacgatgccggtctcccccgtcgcgtaggtgaattcggtcatttccttttcctttccttgttgtcgttgaagtcgaatgcgatgcccttgtccttgtcgatgaggatcgcggcgtcgaacccgctgcccttcctcgaggtgaagcccttgagactgaccttccggccggcgagcaggccgcgcatggtcgtgtcggtgatggtcttgccggctatggtcgtccaggcgcgccagccgcatccctccgtggtcctccatgtgccgtcggattgtttctcgcgccggttggtggagcattggaacaccttgcccgttttgatgacgggcttgccgcagcgtgggcatgggccgaacgattccgtgttccgtttcctcgcctgcacgtggtcctgccggacggcgatctgcgcatcggccgggatgccggcggcgaggtcgcggaactccgtttcgatctccgcggcgtccgtctgtccgtgttcgacctccgagaggcgtcgttccatgtcggcggtcaatgccacgtccttgagcttcggggcgaccacgtcgatcagggatcggccctgttcggtggagcggagctgcttgcccttgcggtccacgtatccggtgcggatcagcttctcgatcacgtcggcgcgggtggccggcgtgccgatgcctccggaatgggattcgtcgtcgtccagggcggccttgaggtccttgtcctccacccagcggctggcgtgttccatcgcggcgagcagcgtcgcctcggtgaatggcttcggcggtttcgtctttccctcggacagtgtcgccccgccttgcgggaccggcgcgatggagaccccgtcggtgaggttcgcggggatgatgttgcccacggcctcgtcctcctcgccatggtcctcctgcggggcggcatgctcgatggcgtgccagccgagggagacgggctggtcggaacggctggtgaaacggcattcgctctcgggcagaagtcggccttcgtccggatgtttctcgcaccaatgcgggtcgatgttcgcgacgacgttcgtcacgtcgtgcacgtagtcgtcgcccacggcctcccacatgcggcgcaccacgcgcgtcaacacgagacgttcgtcgtcgccgagctcatcgagcgccgccttgtcggcctgcatggtgggaaggatggcggtgtggccggccaccttcgcgtcgttcacggtcagttcgagatgtggccgttccggtttcgcggccggttcgatgaagccggcggtgagccggtcgccttcggtgaggccgcgcagcgtgtccaggtcgtcgtgcgtgatgtactgcgagtcggtgcgcggatacgtcgccagttttttctcatacagggattgcaaggcggccaaggtgcgggcggcggtcaggccgtgcagccggctcatgtccttctgcaatccggtcaggtcgtacaggcggggcggcgcgtcgtgctgctgcttgcgttcagccttgaagatcgagaaggcgaagtcgtccgagttgacgatccgcagcagcatctcggcgtcctcccgcttgtccaaacgttcgccggacagcttccatccgcccatcggggcgacgaccttccagtacggtcgggagacatggccggctatctgccggtcgcggtccacgatcatcgcgagcgtgggcgtctgcacgcggccgacggtgaacctcgcgttgtagacgaggctgtaggcgcgcgacgcgttcatgccgatcagccagtcggccttcgcgcggatcatcgccgaatcggcgagcccctggtattccgtctcgtccttcatggacgcgagggcgtcgcggatggcgtcctcctccaggctcgcgacccacaggcgtcgcatcggcttggagactcctacatgcgtcacgatccgacggaagatggcctcgccctcacggtcggggtcgcatgcgtcgacaagcatgtcgatatcgccgcggcgcatcagtcctgcgacgaccttgtactggcggtctgcgcccttgtcccggctgaccttccattgccagtcgggtgtcgggtcgatgggcagcgtgtcgaggctccactttccccagtcgtggttcttgtattcgtcgggcgcggccaggtcgacgaggtgtccttgcgcccaggtgaccaggtcgtcgccgacctgcacatagccgtcatgcttttccatgtgcccgccgaccgcctgggcgatggcctggccgaccgaatgcttctcggcgatgatcagtcgcatcttgcatcacgtccgatcatcagtagttgccggacgcccatgcgggccgtccgtcgtccgaggtgtcgggttcggctgcgggctcctgcggggcgggctcgtcgtccgcctcctggacgtcggatccggtcgtctccggatccgtcgcggcgtcggccgccggcgcgacggtgggttcggcggagacggtttttcttccggccggcgcggcgacgagttcgcccttcgcgtcgaacgcgacgcttttttcggttccggtcattgccagcttgtccgcgatcattgttcggctcatgccggggaacgcctcctcgaattgcctcgccgcgtcgcgcagcgcctgcgcgcttttacggaagttgtcgaggcggttgtcgaacttcttcgccgccgtctccttgcgtttgaacgactcgcgttcgtcgcgcaggaagtcgtccacgtaatcggatgccatggtccgtttcctttccagtcttgttttcatcggttcccggttttgatccggctggaaccatggtcacgcgattggacacgcgccggtttggacagtcgggctccgccaggatcacacgcttgtgatcctggcttcgccggaaacggagcgcggccctgggccgcgcgctatcttcgccgacccttccgggatttccaggcgtcaacgcctggaagggaacggccgcccggccatggttcatcatcacagccccgcgcccgcgtcttcggaactgcgtgttccatgctccgctccgggagggtttcgcccgattatcccgaagcgggcacggcccacgcgtcctccaccgcgcggcgggaccgcgaggctgccccatgtccggcgaaaggaaaacaggaacgccggcgggacactaaggagtggaaccatgcagatggaaccgatggaattgcagcacgtcgtcttcgagaccgacgggggacgaatcgacgcgatgtggagcgacgtgcgtctccacgagcacgacatcaccgacggatggcactgctacgccgtcaggggcggcgacggcggatggccgccatgcagcatcgagaaaacagtatgggtcaaccacgcgggcgacatcatcacgcccgacgacctcgacccgctgctcgaaaggaacgggtggatgctcgtcatcagggactggtggttcaccgacgaaccgttcgggcgcgcagaatgaaaggagacatggacatgaaggagaagaacagggccgaggaatggttccgggccaaacacgacgagctcgccgaaacggcgcaggccaacctcgccgcacacgacttggaacccggacaggaggcctaccatctggacagcctccactatgcgaccgccgaacagatggaggccatatgcccgacgggcatcgacttcgaccggtacgcgactctggcgaacggcagcgtcggatacgacgaggccgacgcgcattgggccgacgcggcatggtgggacgaacaggcgcgaaccatgtgggacgaagtcgacgacatccctgacgacggcctctactggacaagcgtcgaagactaaaacgtcatcgccgttcccggccaagtgacgccccgggaccgatgccgcccgcatgacgcgggcggcgcctccggcggccagaggacgactaccgtcctctggactccacgcgccgggaaccgttcccggacccgacaaggcgtcgccgtggcacggaggccacgtctcgccgacgggaaacggagcacggcaccaatgccgcgcgcatcccgaggattttcttttgaccggccggctgacgccttgatcatagcggcacgcggaacccatcaacgcccgcgcagcgaaacccgtggtttcgacgcgttctcatgacggaacccgctaccaccgctagcgctttcgcttgaccatccggtcaaaagaaaaatatcctagaatggaagacaacgaaaacaaggaggcggacatgccggtcatcagcatgttcttcggaatcatcatcaccatgaacgcggacgaccatgttccgccgcacatccacgccagataccaaggccacgaagcgtccttcaccttcgatggcaacctgctcaagggagacctcccgcgcaagcagcgcaaactggtcgaggcatgggtgctgctgcatgccgaagagctggaagccgactgggagctggccttcaacctcgagcacccattcagaatcgacccgctacgctgacaaggaggcaacggacatgaccatcgactattcaatcaaagtgacccaatgcgagcccatgcccggctacaagctcaaggtcacctgctccgacggcgcgaccggaatcttcgacatgtcccgatacatcgaccgcggcatgttcaaaccgctcaaggacccgcagacgttcgaccgcgtgcgcctcgcgttcggcgtgccctcatggcccggcgacatcgacatcgccgcggaacgcgtccgctccgacatgcaaatcatctagaagcccacgcgcatccgccccgaccgtcatcatgaaccgcaccccgattgttggactggagtaattcatgtccgatgatttggaggtgcggttttctatgtcacggaaacgcaggggttcatacgatgtcgagtatatgagaatcgtcgtcgggttgattcgcgatgggatcggcgccaagtcgctcgcccgccggcttggcgtgtccaaggaaaccacgagagaatggttgctgtcataccgaatcggcggagaggcggcgctcatgggcgaacgcgagggcaacaggagatacgattacgagacgaagctcgccgctgtgctcgaccatctggaacgtgggatgagcaggccggaggtcatggaacgttatggcatcgccagccggacgtgtctgaaacagtggtgccaggactatcgtcgcggagggccggaggcgctgcgcccgaagcccaagggcaggccgaagggcgcgaaatccaaaccgaaaccggctcccacgcgcgaacagctcctcgaggaggagaacgcgtatctcaaggcgagggtcgcgtatctggaaaaagcccgcgccctgctggcgtcgaagccgacaaccgggagaagtcggtgatcgtctcgacgctggcggggctcggccatccgctccggtgcctgttgaaaatcgcgggattggcgagaagcacctactactatctcctttcgcatcccgagccggtcacccggccggatatcgagccgatggtcgctgaggtcttccatcgcacgcccaacgggtgcggccaccggcaggtgcgcatgtgcctcgtatacgagttcggcgtgcgcgtgagccataagagcgtgctcagggttatgcgccgcatgggattgaagtgcgccatacgccgcccgaacccataccgcagatacagctcataccaaggcgatacgggcgcgaagccgccgaacctgctggaacgagacttcgcggccgaccggccgtgggtgaagctgggcacggacgtcaccgagttcagggcagcgggcggcaaggcgtacctcgcgcccatatacgacatgggatccaaggagatcgtggcctgggacgtcagccggcaccccgacctcgcccagcagcaacggctgctcgccatgctcgaggagaagctgcccgaaggcgccgatcccatactccacagcgacatgggctggcaataccagcacgactggtggcggaacaggctcggggaactgggcatccgccagtccatgagccgcaagggcaactgcatcgacaacgccgccaccgagcaggtgttcggccacctcaaggacgagttctacaccggccgcgagttcgcctcgtacgaggagttcaagagcgaactggacgcgtacatcatccactggaacaccagacgacgccagatacgactggagggacacaccccggaggaattccggaacatgtccctcacagcctaatcaggtacccttaataaaccacgtccaacttccggggcgcagttcatcaagacggccggggccttttcatgcccgtatgcatgacggacatgacgcgccaccaacgacccaccggccccgcgattttttcgcggggccttctcgtttccctgctccaagtgtccaaacccatcgccgtttccacgacggacgattggcgtaagacaccggccgtgccctcaaggccatgggcgaaaggagcaaggagtgaacgcgatcatccttcacggcattgcgcaatcatgccgtgcgaaatcactcccaatcaatgaaattgatatgggagcagcaagtgacgtgaacgtatatacgttcactcgattcgcaccgcgaatcggcttgctcgggagacccagaccccatggtcgagcaagctctccagaccgcttcgcggcatcacggacgtgccgtccgcacacctccacgggaggtgcgaaatgagctgggcgaacaagcgccgacgcaccgtgcagaagctcgtcacgttcactcccgacgagtgggaacgcgtcaattcgctgcacaaaaaggtgaacaagtacacgacaagataccgttcgttcaccgtgttcgcacgcaaaatgctgaccgatggcgagatccgcgtcaccgagatcaggccgctgacagaccccgagccgctcgccagagagatcggccgcatcggcgtgaacgtcaaccagatcgcccactgggccaacgcgaacgagcacatcaccgccgagcaggtggccgagctccgcgcgtcgttcgaccgcatcgagcgtctgctcggcgacctgttcgccaacaaacgcaccgccgggaaggacgtgtgagcatggccgtggtcaagctcggcaagcccgtgaaatcgaatctcggcggccccaacggggcgatggcgtacatcatcgaccccgccaagaccgacggcggaagactggtcagctccaactacgagcggaccggaacggactacgacgcgctggctgatccaatgctcgaagacaacgagaactcacccaaaggcatccaaaagaacagccgtctggcgtaccacatcaagctgagcttcagtcccgatgaccccgtgacgcccgagcgggtgcacgaactcggtgtggagtttgcgcaccgcatcaccagtgatgaatacaagttcgtggtcgccacacacaccgaccgccaccacctgcacgaccacatcatggtgtgcgccgcctcccgatacgggaagcatctgaaggcggaactacccaaggacatcatcgaacagtggcgcgtcatcgccaacgagatcagcgagagggaggggctaagcgtcatcttcaaccccgccaccgagcgggtcgcacgcaaaatgcgcggcgacgaaaccacgccgaacgaagacccgacgacacaggcacgcgacaccaaacatgtcgaagagacttccgaaccgggcacggcggcgacggcgcgaacgacgcgacgggccgaaaacgaggagccgatggagcgtcgctacggcatgtcgatggaggagatctacgcgtccgcgaagggcctgggcgtcaaggaccagctccgcatgctgatcgacctgaccctggccggcgcggagaacttcgaggactggaggaacatgctcgacgtgcagggcgtggacgtgacggtccgaggacagcacttcacgttcaccatgaaggacaccggcttcaaggtccgagacacgaaactcggctcggcgtacgacatgacgaacatcatggccggactgcaaagcacgcccgtcatccccatcacgttcaaccgtcggctcgtcgccaaacagaccaggaagacggtcaccgtgtggctgcccggcacccaccggaagaaaaagatcacgttcgacgcgaagcgtctcgtggacgacggcggatccacgctgcgcgcgttcctgcccctccaccgcgaccagatcatcctcgacccgtccaaccggtacgccggcaagaccaccacccacggcctctaccagtggttcggcgaacccacaagccggctcgaaccactggcctcgcccgaacggctgcccctgcgctacggggtaagccccacccagcagcgctactaccaggcacaggcgcgacgcctcgaccggctcgccggcgaggcgaaggcgctgaacgcggcgatccgctggaccaggctcgcgggcggcgacagcgccaagggactcaagctgctgcgcggaaaggtccgcgaatcgcacgacgaactccaggccgccgtcatcgcgttgcatgacgcgatccaacagggagacctcgacctcgtggccgagacgcgcggcgagatggaacgtcgcgaggccctgtgcgaccggtacgagggcgagctggccgccatcgaacgggagatccacacgacccgcgaccgcgagcaaacggagaccgagcagcgcgaacagcatcagcacaagcgtggacggtccatctgaaccgtcccaggaaacaccaaccgacaacagaaaggaaaccgcaatgccaatcgaggaacaggctgaggagaagatccagaacgccgtccagaccatcatcaccggaggcgcgaagctcatgctcagaatccccaagggcgtggccatggcgctgctccgttccggcatgaagctcaccaagaccggcgtgcacgccgcgggcgaggccgtcaagaacaagatcgacagcggcgagatgtccgagaaacgattgcaaaggaagaaggacggcgacctgcacgagctgcaactcgacgactcgaccatgcgcgaggtacagcacagcctcaagaccgccggcatcgactaccacctcgaacgcaccgaccaaggccagttcatcctgcacttcgccggcaaggacgaagaccatgtccgccacgcagtgcaacgcgcgttcaaaggcatgggcctggacgtcaccgacgacgacttcaccgtcgagcagacggaacagacccgaaacgagccagaacccccggcgcgggagaccccggccgaaccagccatgaagcccatgccgacgcagcgcatcgcctgggacttcgtggacccggaggtcatggagatggccgcgaacagcctcgccgcccggcatcccgaactctcatgggacaagctcatgggcgacacaacatgcgacgagcaggccggccgcgacttcgcggaccggatcatcggcaaggccgccgccgacccgagcctgcgcgacgagctcgacaccatcctgcgcgacgactacgggcagggcgcgcaaacccaggagcagacacgcaggcagacgatcgagccgaaccgggagaagccggcaccggagccggaaagcgaaccggaacccgcgccggacgaagcccggacaccggccacgcgacagcagacgcaggccagggcagacaatcccaggccggccggcaaggagcggaaaccgaagccgatccggtcgaaaaaggcactgctcgaacggttcaagacccggctcaacgagaacctcgccgaacaaaagaaccacatgccacccacccagaacagggaccgcacgccccgcaagggccgctgaaaggaaaccataatgaaccagcaggaacaggcgacgcaacacgccgcgatcttccaggacaccatcaacggaaccaacgacccgaccccatggccggtgaccatgtgggcctcgtccggcgacacgatatggacggccggcactgcaaggacggccggcgaggactcggtgggcatgatctacgatcccggcgacaccatcgtgcaccggaacacaatcgccggcgacgtgacccgcgccaccgaatccttcgccatcagaccggcggacgggcagagcccgatggacgcgatgctcgcgggcatcgaacaatggaaccaccgccatcccgaccggtgggacaccgtggccacgccgggccagtaccgcatgacggatccgacgacgggccggcagctccctatgggatggagcgccagcctcgccgccgccgcgtccgcggcgggacggctcgaccccgacctgctccaggccagcctcatgcagaacgcggtcgagcacgagccgcgcccctgcgtgttcttcctggaggataacgggtacgacctcatggtcttctcctggcatcggaaccagcagggactgttcgacgcgatgagcttcaaacacctgcaatacgacgacctgagcatgcaggtcaccaccatcagccacagcgaggacatgagcgagtccttccccgccaagaccatgagcgacggcgaactgctcacacaaagccgcgtctaccgggacgaataccagcactggcgcgaacaggacggcggacccgtcgcccagggcatgaccggccgcgtcatgcgcagcggactgctcaaaccgggactggagcagaagccgctgctgaatctgaacgacggtcgacgcgccccggactgggacgagttcaccgaccaggccgccatatccatcctccagggccaacccatctcgccgacgcccgcgctcccccagcaggagcagccggagcgggacaccgaccccacagccgtgacacagacgccggcccggacggccgcggcgacgaagcaggtctggccgaacgcgtgggtggcgaacaggctcgcgcacacctatatattgcatgcgaaggacggacgcgactggccgaagatgatcgtcggactcccccgcggcaccgccatcgatggcaaggacctgaccggctgggcgaccgacatgttcatgagcgcgaagaaccagaggcagaagaacgagggacgggccgtcaacatcaggttcagacccggcaccccggtcgagctgttcaccggccgcggaacggaacgccgcaccatgcaggtcgacccgcagacgctcgtccaggcggtcatcgacgcgcagaaacgcaaccgcgacgccgagaagacgctcgacacggcatcggtggagctcgcctcgaagaccgtggaggaatcctggccgcagatcgaacgcatgcagggccggttcacggaataccagcgtgccggcacgtacaagccgtccgtcgcaatgaaatgggcgcgcagactcgtcgaccggaccgccggagaggacgagggacggtggaccaaccgccaacgccgccaggccgccagactgctcatccaggaactcaccggcacgcaggatccgacgcaggccaggagcaaaacaacggatcgtccgaccgtcgaacagtacgtgccggaaggcggcaaaacgcccgacgccataggcgatgagacacccgcgccgccacggaaaacagagacggacatggcgacgaaacagcggcaagaccccatcgttcccgcctcgcaatccccggccgccggtccggaacgacggcacacggacctgaagtcaacgctcgaccggttccgcaccaggctcaagaagaacctcgacggactcaacgcagacccgcccaccgccggcaccgatcgtaaccgcgggcagcggaaaaccttataagaaaggagagaaccatggtgagaaaacgcctatacgcgaagcagaccgcctcggtcgaatacgagcagatcgacctgttcagccttctcgaggaggagcagcgacaggtcgacaggacggcggaacaggtgcgcggatacgagataacggtgggccacgccgcggtgcaacgactccgcgcacgcggcgcggacgacgagacgatagccgccgtggcggccgaataccgggagaaccggctccgtggactcggccgacgggacgcgcggatcgccgccgagaacaagctcggcgtcggtgccgccacgcccggcgaaaccacgccgcaacctgtggtaaaacgtttcacacaatcctccggcacggaaaacaacactgaagaaaggaacaatgatggacgagatgacatggaccgacccgcagctcaaggcgcgctacgagaggaacctcaaggcgatggaacagcgccgggcggcgcatccggaactgttcaacaagtgggcgctgccgtacaaggtgttcacccgcagcagcctgcacgggatccagaacatgcgcatcaactggctgatggacaaccatccgcagcggttcagggagatgatgatggccaacgtgctcgaggagcatctgcgggacatcgagaggcggacgagggaacgccaggcgcagatcatggaccagctgatggagtccaggcacctgctcaaccggacggactgcctgaaggcggcaccccagatgaccgacctggaccggctcaacgggatgaacgaggcgcaagcggagtcgatgagcatggcgatccacgagatcgtggaaagcttctagcatccctcgactcgcaacgcgcgcgttcgccccgcgaacgcgccgaagcgaacatcgccgccattcggacactcaagacgctcgatgggaacggcgacgagcctctctccgcggagcagacggacacgctgcgcggatactcgggatggggcggatgcgcggacgcattctccgacaagcccgaatgggccgacctgaacgccgagatccgcgaactgctcgacgacgatgagtacacgcaggcgcgcgcctccacactgaccgcctactacacgcccggaccagtggtcaaggccatgtgggacgcgctcgacatcgggtccgcgcccatccaggtgctggaacccgggtgcggcaccggcaatttcatggccggcatccccgaaaacatcaaagcgaacgtgtcgggcgtggaactcgatccgatcagcgcgcgcatcgcggccgcactgaacccggacgccacgatcctcaacgcggacctcgcggactgcaccatccatccgggattcgacctgaccatcggcaacgtgccctattcgggcgacatcagcctcgactaccggaccacggacggcggcacatcccgcctccccctgcacgactacttcatcgaacgctcggtggacgcgctgcggcccggcggcgtcgccatgctgctgaccagcagatacacgctcgacaaacgctccgagaccatgcgcgccgacctcgcgagaaaggccgagctcgtcggcgcagtgcgcctgccgtcctcgacgttcgcccgccaggccggcaccgaggccgtcaccgacgtgctcgttctgcgcagacgcgaacggacgctcgaccgcacgcccgacgaggcgtggatccactccaatccggtcgccgtgcccggataccaggacgtgaccgtcaacgtcaaccaggcggtcgccaacgacatgaccgcgcacgcggtaggcgacatcagaccggtgatcggacggttcggcggcgacttcgacgtcgtcttccagggcgacgcggaacaggtcggcgaacgactccaagaactgctctccacacagatcacccacggcccggcgctgtcgctgggcgaggcggaaccggccggacgggcggagatcacggtccggccggaccatgtggcaccgttcgaatactccgtcgaccagcgcggagtggtctggtacggcgacggcaccaccgtcaccgagatagcccacggccagggcgacgaggcgcgacgcctgcgcggcatgatccgcctgcgagacctggcgcgcgagctccaacggctcgaactcgaccccgcccgcgtagacgacccggacgtggaagccaagcgcgccgaactcgaccgggcatacgaccggttcacgagcgagttcggacgactgtgcgaccgcgccaaccaacgcgcctacagcggcgaggaatccggctgccatctcgtcatggcgttggaggagaccgacgaaaagggaaggttcgccggcaaggcgaaatgcctctcgcaacggaccatcagcccggtgccgcccatgcccgaccatgccgacagcctggacgacgcgctggacatcagtctcgaccgcgccggcggggtcgacctggaactcatcgcgcgcctggccgataccaccgtcgaggaggccgagaccggtctgggcgaccgcatcatccgtgacccggacaccggcgaggtcatgcccgccgaggactacctcgccggagacgtggggacgaagctcgaccacgtcacggccatggccgaacacctcagacgccgggcggcacgcgaggccatgacggagttcgcggcatccacctacgcgacatcggaggacatgcccgccatagagcaggcacgcgaatggatcgacaccgcgggaacggacgtgtggcgcagcctcacggacccgtacgccgccgaatcctacagggatccgacgccggtcatcgaacgcatcaacgacggacggcacggatggaccatgggctggaaccgcaacccggaactcgtcctcgccctcgtctggcgggcggtggaggaactgcccgagcgccactcacgcgtcaccctcgaacgatccgacaccggagagcggaagccgtggcacgcgccggcatggcaccgatcgcacggcaccagcccactgtgggacgcattgtgctggacatggcgcgacggcgacgcgccacagcactacgcgccgatcctcgccgaccggcgcatgcccgtcagggacctcgccctgttcgtccacaagatcgcccacaccgaccggctcgaaaccgccgacaagaccgcgatcctctccaacctgttcgagagctattcggcccacgacaagcatggcagcacgatatggacggacacgaccatcggcgcgatggtacgccgtctcatgcccggcaccgacgaccccacgcggctcgccgaacggctcgccaccgacatgtcggtcagcgaatggatctggggcatcgcccgcgacctgcccgacctgcgccagggagcggcacacgacgcctacggcgcgccgccacgtgccatcgacgcgcgccccgacgactaccaggcgttccgcgcacgccgcgaggaacagctcggacaatggcgggagcagccggagcacgccgaggccgcgcgcgccgaccagacggacgcggaacggctcgaacacgtggccgatctgctggaacgcgtacagcccaccccgctggagaccgagcagatcaaggcgccgctgggggccccgtggatccccgccagggacgtccacgacttcatgatggagacgttcaacgtgcgcggccacgggctcacgcccggcaagctctcccagtactcggtcgactggatcccccagctcggacaatggcgcgtcggctactcgggcggcggcgacatcgactacaaggcagcaaggacgtacggcaccgaggaccgcaacccgttccaactgctggaggcgtgcctggacaacgcgcagatcaccgtcaccaaggactcccccacggagaccacggcgtccggcaagcccaaacgggtcaaggaccagaaggccacgatggccgccatcgagaaggccaacgcgatccgcgacgcgtggaaccaatgggtgttcaaggaccccgaccgcgcgcaaaggctcaccgccctgtacaaccgcagattcaacggcatgcggccccgccacgtcgacggatcctacctgaccacgcccggcatcacccacggcgtcgccctgcgtccgcatcagaaggacgcggtggcccgcgccctgcgcagcgacgagggcaccctcatcgcgcacgtcgtcggagccggcaagacgttcgagggcgtcacactctcccacgaggcgaaacgtctcggcaaggcgtccaagccgatgctcgtggtccccaaccacctcgtggaccagtgggccggcgacgtgctcaggctctatccggccagccgaatcctcgtcatggacaaggacgcgcaacgcaaccccgaatcggtgagacgcttctggggccgggtcgccaacggcgactgggatgcggtgatcgtgccggagagccggttcagccagctgcacgtcagcaaggaacgacggctgaggaacatgcgcgcccgcgtcgacgagttcgcccaggccgtcgaggccgccgccaaggccaggggcgacaaggaccccaccgtcaaacggctggaggcggcgcgcaaaagcgccgagaccgccatgcagcgcctgcgagacggcaaggagtcgcgcgacgacaaggcactggcgggcatcaagttcgaatcgcttggcgtggacatgctcatcgtcgacgaggcccaccacttcaagaacctcggcgtgcccgtcgcctccgccgacctgggcatgcaactgtcgtccgccgcgaaatgcgaggacctgctcgacaaatgcgaatggctgcgcgaggccgggcacggaggcaacatcgcgttcatgaccggcacgccggtctccaactccatgagcgagctgtacaacatgcagcgctacctcgcgcccggaaccctcaaggcccagggcctcgacacgttcgccgcatgggctggcgcctacggccaggtagtacccaccgtggaactgaagcccgaaggcaacggattccaggtcaagcaaaggttcgcgcgcttccagaacctgcccgaactgatgaacgcggtgaagcagttcaccgacatgatcaccaacgacgacatccagctgccgctgcccgaactggagcaggtgcccgtccccgtgcccatcaccgaccgccagaagaaggagatggaggagctgtccgacagggccgacctcgtgcgcgacggcgacgtgccgccggaggtcgacaacctcctgcggatcactggcgacgggcgaaagatcgccctcgaccccaagctcctcaaaggccacgagaacgaccgccccctggagaacggcaagatccaggcatgcgccgagaacgtcgcccggatctggcaggaggagacgccacgcctgggcacgcagctcatcttctgcgactcgagcacgcccgcgtcgggcggatggaacgcctaccaggacctcaaggaccgcctcatccaattgggcgtgcccgccgagcagatagcgttcgtgcacgacgccggcgacaaccccgccagacgcgagcaactgttcgccaaagtcagatccggcgagatccgcgtgctgatgggaagcacccagaagctcggcaccggcaccaacgtgcaggaacgcctcgccgcgatccacgacctcgactgcccatggaggcccgccgacctggaacagcgcctcggccgaatccaacgccagggcaacacgtacgaccacgtgcgcgactaccggtacgtgaccgagggcacgttcgacgcgtacagctaccagaccgtggaacgcaagcagcgcttcatcagccagctcatgagctcgaagagccccgcccgcgaggccgcggacctcgacgccgacgtggtgaccctcgccaacatcaaggcgctggccaccggcgaccccgacatccaacgccgcatgacattggagaacgagatcaaccagctgaagctcctgcgcgcctcatgggcgcagcagaaggccgacacccgcagggacatcaaccagcagctccagccacgcatcgaggggatccgccaggcgatccgcgagaagaccgacgacaagccgctcgcgtccaaggccctgaacatccaccagaccgcacgcatgaacggcaagtgggagggcatgaccatcaacggccggccggtcggcgaccggcagaccgcatgcaggctcctccaccaggccgcccaccaggcgcacgacggggacacgatcgccgaatacgacggactgcccgtcatcgcacgcagggcggccaccactggacggatcaccctggccgtcaaggccgtccacgagcacgaatccggtaccgagatgcccggaccctacctgaccggaccttccagcatcgtcagccagctcgaccggatcgtcaagaacatggccaccgaccccggcaagctcacggaacggctggcggacgccgaaagggaactcgccgccgcgcaggagacgctggccgaaccattcgcccacgaggacgagtaccggcaaaaacaggcagaactcgaacggctgacgtccaaacccgacgaaccccgggagacggaaagtagagaccaggaaaccaaggaaaggagcgcaggaatgccattgacaacggaaaacgccagacgactgctcgaacaggaccacgacgtcaccgaagtcacccagggcggcaacgccatgggccactacctcgaagcgaggctcacggacggacgcgccgtgcagatcgacttccacgacaaccccgcatggaaagacacggaccgtctggccggccggatcgaggtgtcctacgccaaccggccacaggcggaatggcaatacgacgacaacgacatggccgaccgcgaacacaccgtcatcgacccggccgacccagccgccgggaaaacactcgccaaggcggtggagggctgggaacgcgcgggcggcctacatacggcccgcgcagccgggacgagccatctggccgcgaaccagccgccggaggaatacgcctaccggtggcggaagcccggggaccccgacaggcacatcgcatacctgagcaccgccttcgaccgcgaccaggcgatgaaggcgagggagaacgccggatacgtcgtgacgaaggtcgatgaggatccggccgtgctctacgagcagcaccgcaaggcgtcctgcatgcgcgcgagccacatcctggaacgatacgaatcccccgaccaggacgcagtcagaatcctccacggcatcgtgggcgaggtcaacgcgcacgaccccgagaacgacatcgccacctacctcgcctacccatccgacaaggtggtccagatcgccggagacggcctcacctccgcggacatcgcggagaaacgcgagatgggcggatgggacccgcgaaaggacccgctcatgcgcatcaacgcgcagggcgactggacgggcatcacccaacaacaggccgaccagatcgtctgggacaaccgcgatgagatcctcacccgcgcgtcatacgacagtgaactgtccacgtggacgctccaccagcttgaccagttgaaggagccccagccgacccaaagcctggaccgtgaccggccggaaccggatcacaaggcgcccgcacaggccgattccacgacgaagcgtcacgggccaagactgtagtcctctctagccacggggtggcgcgctttccgcgccaccccgcattcattccatacgaaggagcagaagacacgcatgacaacagaaacaaacgaccagccggaacccatcatctggttcgagggcacactcatcagcagcccacggcaaaacagaagcgcggaagactggctgcttgaaaccatggccatgggaacagccacgaggaaaatcaccatccacgccagcggcagggagcattcggagaacatccgcgaccacgcgcgcaagggatcccgcctcatggtcaaaggcaccgcgggcgacgaaggatcaggcatcgacatcgaagccacaagcctcgcgttcgatcccagccatgacgaaccggacgggaatcgatgacacggaccaccaccgtcagcggcatcagaccggacaaggccggcgacggcgaatggatcgacatcaacggccacgtcggccgactcatgtccacgctcatggcagacggccggccattcagcatcgacgtcacgccgggcggcatgaccaccgtcacgcccctcccacccccgaaggacgcggaagcggccggcggcgacgcccaggccgaaacggagccggccgacgggaggatcaccagcaggaagacgctgtacgaccggttccgcgccaggctcaaggagaacctcgccgaaagaaaacaatagaaaggaacaatcatggaacaagcaagaggaatcatcgtcaagacactgaccatcctcgcgggattctggatcgccgacctcgcggccgcccgcgtccaggccggcctcgccgccggcgaaagcatcgaacggatcatggacggcatgacgaccatgctccagcatccgctcgccctgggattcgaccggaccagcctcctatgcggactgggcggcgcgtgcgccgtcggcctgttccacctctaccggtggagcatgaccaacgcaactggcgcgacggcgaggaatacggctccgcacgctggtccaccagccgggagatggccccatacaccgacaacgacacccgtcagaacctccagatgacggccaccgagggcctgagcctcgacgccccggccacgcgccgcaacctcaacaccgccgtgatcggcggatccggatccggcaagaccgccacccacgtcatccccaacatcctcaagggcagcatgaactacgcctgcaccgacccgaagggcgagctctacgcgaagaccggcggagacttggagaagatgggctatacggtcaaacagctcgacctggtggacctgaccagcgagacgaaattcaaccccatgcgctacatcgaccccacgaaacccgacgtggcgatcatgcgcctggtcaccaacatcatggacaacaccaacggctccacacccaaggagcaccagaccgacgacttctggaccaaatccgaacgcagcctgctgaccgcgctcaccgcgttcgtctactacctgcccgacgacatcctcaaggactgcctgcacatcgacgccggccagaccctcaacgcggtcgccgacatgcgcgacctgctcgaagccagcgaacaggacgagaccaaggaaagccaggtcgacgccgtcgcccggaccgccactgaaatatacgaggagacccgcgccgaatgggaacgcgaggacgcggaccacgacgacccggacctgcgcgaggcatggcgtctcgcccagggcctgaagttcgcggcccgccagtaccggcccttcacccagggcgcgggagagaccaagaagggcatcatcatcagcctcggcgtgcgtctcgccccattgacagtcggcccggtccgggagatcctctccgacgacgacctcggtatcgaccggatcggcggatacgcggacgagcacaagggcggatacaggcatcccaacgggaagacggccatcttcctcgccctgcccgacgaggacccgacattcaactttttggccgcgatcttctaccaatgcctgttcgacagcatcatccgccgctgccgcacctaccccggcgaatgcctcgccacgccattgcactgcttcctcgatgagttcgccaacgtgggacgcatccccaacttcgacaagctcatcgccacgatccgctcgcgcaaggtcagcgtcagtatcatcctccagaccatcgcccagctcaagacgatgtacaaggactcgtgggagaccatcgtaggcaactgtgactcggtgctgttcctcggcggcaacgagcagtccaccactgaatggctcagcaagctgctcggcaaggagaccatcgacatctgtaccaccagcgactcgaagggcgtgtccggcagccataccaccaactaccagcgcaccggacgagaactcctcacacccgacgagctcgcgcaattggacaacgacaaatgcatctacaacctgcgaggactgcacccgttcctcagccgcaaggcatggcccggaaccaccatcgccagaccgaaatccacgctcaggcactccaaagaatggaaggcagcggcatgaagccaatcacaaccccggatcgctgccgggcaagccggtgcccccgtctgatggcgtgggcacggaccatcccggcgaggctccgcccgtattggtggaggacgacgagcctcccgaagacgggcgtcgtccggatccggaaccggaaccggaacttccttgggaatatgagggcgtttgccgctgtggagctgattgggattgcgatgcctgggcctgctgctgcgcggcggcagccgcggctgcttcctgttctgccttggccttcgcctccgcgtcggccttttccttcgccgtcttcgattcgttgacctctttcacggctttcgcgatcgcgtccacgtcacgggtcttgaccgccttcagcagggtctcccgggtcttgtcgtccgccaccttgccgtcggtctgcttgtacagcgcgttcgcgtcgtccacggtcttgtcgagtttgctgtcggtgacggccttggccgcggtcttgaggtcggtgagacggttcttgagctctttggtcgttctgcgcagcgccgcagtggtcctgtccacgtcggatgtgacggcgtcgggcgcgcaggaacccttgatggtggacgtctttgcgtccaggagccgattcaacgcatcaagcgtcttgggatccgcgacttggccgcgactggtgtccttcaatagtctggaggctttggccgtggtcctgtccaggtcggactggatggtcttgcgtgtcgcttcggccgagtcgcatgcgctgattgcggtctcatgcgcctcttgccgcatggcggcggcacggcggtttttgatttgcagtcccatccaggacacggcgatgaggctcgcggtcatgacgatcgcgacgagcgctttcccgaccgggaagacgcggcgcaccttcagatcgtcggggtcggccgagtaggtgacggccgaccccgacgattctgcttccggtattggagggatgtccgccgtatccgattccaagtcggcgattcgttcgagtgcggcaaaatcgtcgtcggcgtccttcagggccttctccgcggaatcgtcgggaggagactgctccgccggcgcagacacgggttcctgccccggctcgtcttccggcggcagcggcgcggatggtatggcgacgcgacggcggccgcgcatggacgcgggcggcagcggcgcggcaccggccgtgtcaaagccttgctcctgcgcggtatgccaccattcggcgagctccggccacgcgtgtggatgttcggcgattaggcgcatccatggacgccaaccgggctcgttggccatggcgtacagctggtcgaccgtaagcttggggctgagaatcggctcacccgtcttcctgtcgatcctggtcattcctctccgccctcgtctttgatgaggactggctgatcctgttcgtttgccttcatcacttttgttcctccggtttgccttcatgcacccggtatccgccttccaatgggcccttgaccgccgcgcatcgccagccgtcgtcagtgagcgtgtagtcaagcacccaggatgcctccagcccggtggatacggcgcatgtcgccacccgccgccccgtggacacggggaagccggtgaactcggtctcgggcaatggctgcggggctatggatgatgccggtatgtcgaggccggcggcatccggcgtgaagtattcgccttcgagttggcctcgttcgccgcccatgtagacgccgagcgctttcggcgcgaggtcggcgcacggatcatcctccgtcggcgtcgccggctcggtctcttcgtctccagccgttttttgtccgggttcggttttcgttcgcggccgggcgacggtgatttgcgtgtcctccgcggttccgttgccggcgcatatcaccgcgacgtttcctcccaggatgaggagcgcgaccgcaaatcccgtcgcggcgatgatcctgttcctctttggttccatgcttggttttcctttcagtggatgtagcggacgccatttccggctgcggccagttgggaggcgctgatttcgcgtgtggatacgacgccgaggccaagcgcgttggactcgctgatcaggatcgacccgtccccgcggacctcctcgaccatggcgacatgcccgtagtcagcggacgcgcccaatactcccggttggaacacgatgacactgccggcggatggggagccgtccaccgtgtagccggccgacgccgcggaacctgcccatgtggcggcgttgccccaccctggtatcggttttcctatgtcggctcttctggtcgcggcccaccaggtgcactgcccccatgggtatctcgtgtccggcgtgatgccggccgtggacacgatgccgccggagaccgtcagtttcggttcgagggagccgaccgtgccaccctcggcggtccccgttgcggtgtatttggtcgctgcgagttccttgatccgccgcacatagttgatggtttcctcgaagggcggcaccatgccgtatctgagcacgctgccgaggccggcgttgtacgccgcgagggtcagctccaacgtgtcgccggtcagtttcccggacttcttggccgtctcgacctgcgaggcgagattgcacatgtagttgccctggctccagatcgcgtcgtgcgggttccagatgtcggccttgccgtctccgtcgccgtccttgcccgcggatgcccaggtggacggcatgaactgtgcgatgccctgcgctccggcggagctgccggccttcggattccaattggactcctggtcgatctgggcggcgatgatgctcggcgtgacgacctggcagatggatccggcgcggatcacgtcggcctcgtattccgcgggaacgcccgagaccgtggattcgctggcgttggatccgaggaacgcgcccatgacggccaggagcacgccgagcaccgcgagcatggccgcgatgacgggcaggatgggaaggctgatggaggcggctcccgcgatgacgcgggacgcggccatgcgcacgaagttcgcggcgacgcgggcggcacgcacggcggcctgtccggtggcttgaacgtcgcgcgccgccttgacgggcgcgcggcggtgccgccagatgaatttggccgacgagttgacacctttcacgccagcgcgtgccgctttgaaggtcaggtcgcgtgtggcgcttcccagcttggacgcgaaatcgtcgtcagccacggtgagcctcgcgccggcttcgtccatccagcccatgccggtggatcccatccgtttgacgctacggccggcgttcccaaggcccgcgcctatgtgcttgccgatccgcttgctcgctttgcctttcgcggcgaacttgccgatcttctcgctgggcttcgcctcggacagcgccttgggtttgccggccgtcttgcgcattcccttgcccgaccgcagggcgcgtttgccacggttcatgatgcgccgcgccttgccggccgtccagcccacgccgtgcatggtggaggacatgccgtacatgccggcgcgtcccgccatctcggcggcggtgtggcccatggaatcggcgatgtcggcccggtccgagccgaattgcgcggcgctggacaccacgccggtggccgcgcgtccgatgcgggcgcgtgtgcctccggcgtggtgggcttgggttccgctcatgcgtttactttccttcctggaaggtcgtggagtacagccggtagaggtcgccgcccgcggggatgcgcccgtcgaacggcacgtaggcgctgccgatcttcatgagtccctggccgggcagcacgccggtgaagtactggcgctgctcctcgctcagggtcagcagctcgcacaacgcgtccgcgtcggtgctgttctggctcaggagcatgaggaaatcgctgttggacagcatctctcgcgcgtcctggaggtcgaggatctcctcgacgttctgcgtgatgccggtcacgccgagcccgtatttgcgggcgcgcttgtagatgtccttgaactgggcggcggcgtactggttggagaagaagcggtggaactcgtcgacgtacagccaggtgcgccgcccgttggccttgttgcggatgacgcggttccacacctggtcgatgacgaccatcatgccgaacgtgcgcagctcgccggacaggccggacacgtcgaacacggtgaaccgattggacaggtccacgttggtctggccgttgaagccgctcatggagccggtgatgtacgggttgagcgcgtcggcgaggtaccggctcacctggtcgccgcccgcctgcaattcgtcgtgcaggtcctgcaatgtgggctggaccactcccccgccctggttgcggtaacgcgtgtacaggttgctgacgcactggtcgacgagtcccttctggagcgggtcgaggccgtcgatgccgccgatgagcgcgccgatcatggagaccacgttgttggtcttgtccttgacggggtcggaggccgaatcgtcctccaggacgatgtccatcgggttgacacgcgtgccggtgccggcgctgatctggatgatctgtccgccgaacgcggccgcgagggcgaggtattcgcgttccgggtcgatgacgatcacctcgtcgtcacggttgaggaacatgccggcgatctcctgtttgacggtgaaggatttgccgccgccggacgtgccgagcacgaatccgttggagttcatgtggctgcgccggtccgcgaggatcgggttgccgctccgggcgttcgacccgtagaacaggccgtgcggctcgaacacctcctgcgtggtgaacgggatgaggatggccgcgctgttcgtggtcagggtccgcttcatgggcagggggttgttgcccagcggcagctcggccgtcagtccctccatctgcatgaacttgaggctctcggccgtgcaggactgcgcgttgaccttggctttcacgttcctgcacgcgacctccagctcctcctggcttgccgcggacacgccgatcacgatgatcgagtccacgagcctctggttggtggagcgcagctcgtcgcgcagctggccaagctgttcctgctggtcggcgaggtcgtcgggaaggtcgtcggggtcgaggccctgcttgcggttcttgcgccgctggtccatgatctgcatcttgacctcggcgttcttgcggcgcacgagcgtcatgctttcgccgcggtccatgggcgccaggtggatgctcacgtcgacgcgggcgcgcaggccggtcaggtcgttgaccagctggtcggacagttccggcggcagactggacacccacatggtgcggtgcaggtatttcgagtccagggattcgatgtccagctggatgggatttcgcgcgtcgatgctccacgggcacacgaggtccttggtgtcgggcttgccgggctgatgctcgaaccggcgttcgtcgaaccggaactcctcgccgggccggagcacctcggccatgaggcgcagccggtgctcgcggtcgagtcgggtggccttgcatgcgtcgatggagcgcatctggctgacgaggttgttgcacaacgcgttgagggtcgcgacggcggcctgctcgtcgctttcgcggacggtgacggtcagggtcttgacggtgctggtgttgcggctgacggattcgagtttgccttgggcgaggcggttgtagtcgagccggtagtggtcgaggctgtcgccggtctcgcccatcatcacgtcggcgaggatctcgcgtacgccgcgtgagcgcgtgtaggaggcgatctgcacgttttgcccggcctcgaagctgttgatgagcttggcccaccggtcgatgatctccatctgatgggattccgggctcagctggtagttgatgtcctggaagaggatggtggcgctccaccgtccgtcgcccaggctggcgatcccgttgcgcagcatcgcgtcgtagccgatgagctgcttgacgcccttcggcagacgcgtcgccttctttctccgcgccttcgccctggcttcggcatcgtcttcgtccggcgcgacctggggtttcttctttccgaacattcctcacctttccttgatcgttggtttcgcgccggtgcggtatggtctgcccggaccgtcgagcagatagacctcgcgctgcgtgtagtggcgcaggatgtatttcaggtatttctcgggcatgaggccctttggcctcacccatccccatatggccacgggcaggccgggcgggaagatcaggtacatggcgaggttggggtccatgcccagcccgagccacagtccgacgtatcctcccccgcacacgatggcgaggatgacggcggcgaggcactgcctccagctcatccccatgaacaccttcgactcgatggtggtcagttccctgtagacgggcatctgcaacgccatgatgtttgcttcctttcgtggattgcgttgtgtttcattcgccgccgaagagcttcttggcgacggagttggccgccatgacgatgccgatgagcatgacgctcgccaggagcaggccggtgaagttgtccatcacccagccggagaggctgtcgccgtccttgaacttgctcgggttgagcgtgccgcccacgagcgtgcggtacatgaggatcgccagatacagggtcgcgcattggaacaccagagacgcgtactgtttgaagtagttgatgccccactggcgggtctcctcctgggcgatgaaagcgatcggcagcgggttgaacgcggtgagcatgtatatctgcacgaagcgcaggaggatgacgacggtgacgacgatggtcgcgcccttggagacgaggaacgggatgagcagcaggatcaggcacggtatctggcccatccagccggcggagtctatggcgtcgcgcatgctgtcgccaaggccgaggcccgacgacgcgccggtggtgggtgccgccgaatggatgccgccgagcacgctgtcgccgatctcgtcgatggcctggagcatgagctcgctgtgctgggccgcggtgaacacgagcgtgagcttgaacatcgccatggcgacgagcttgacgcccagctctcggtcgccgtccgcccgggtgctgaccctggcgagttccaggacgcacatgatcgccagtatcgtgctggctatgggtttgaccgccgagcgggcgacggtcaggctcagctggtacatgcccgcgttgtattcggcgggggtcttcagcaggtcggccacgaggtcgtcgccgacgccggaccctatcgagttgaggataccgacgatgaaatcgaccatgcgtggcctcccgtctacagggcgatgttggagaacagggccgcggccgcgatgatcaggccgccgccgacgacctgccagacgcccgactgggtggcggggccgttctggtccttcagtcctccggccagggtgatgacgccccacacggcccacaggccgccgccgatgatggcgaactggctgaagagctgcaacgcgctggtgacgacgctgccgctgtctgccgcgatggtgattccgtacatgatgttttcctttcgatgttttggatgacatgaccacggtatggccgtcgagaaggctccggtttggacgttcccgacgaacccgaagaggctcggacgatggtatggaaaagggcccgccgaccgttcgccggtggggccgggtcccgccgccgcgcgccgggtttcgagtgccatggttcccgtccggcgttccgcgggccgcggaacatggaaacggacggcatcatgcgaaaggaagacggaccgatccgccacaaggagattttcaaggagtcggacggtccggtgcgcaagggaaaggggtggccggccggatccgacctcattggatccggccggccaccccgttctggtttccatggtgcgcgggaaggggttcccgcggcgtgcccccgccgggagtcgaacccggcgccgtcacaaaggagaaaacaaagacggtaccggtgggggcttgggcgcgtccgggaaggaaaggatctgggcgcgcccgtgggcccgtgcggcggatcatggggaacggtccgccgcacgggcccggggtcaggttcgtcggatcactcctccgagccctcggtgtcggccggggccttcgccttgcggcggcgggagacggccatgagggccgcgcctccgccgagcacgacgaccgcggccagcgcgatcagcgcgatgcccgcgccggtctgggcgagggtcctgcggtagccgttccagtcgtcggtggcggactccaccttggtgtccgagcagtagtccttgccgtcgatggtcacgacgtcatcggacttgctctcggtctcggcctcgggcttggagccggattcgtcgtccgaggtgccgtcaccgaacggggccgacgtgtcgaccggacattcggtcaacggggtgccggtgaccttggctcggtcggtgtgggtcttggtgacgcccttgagcgtgccggtgacctcgacgctttcgccgggcttgagcaccttggtgtcccagtcggccgggtacttgaggtccacgacctcgccgtcgccgacgatggtggagtcctcgagcttgatgtccttggtgcggaacaccgcgccctgcttcgtgtcgggatcggtcttgctcgtgttcgtgatggtgaacacgatctccgtgtcgccggagacggtcaaagcgtccttcgaattgtcgcggtcgccgttcggccagccggacttgcgatcccacttctggacgtcgatgctcggggtcatgtccggggtgcgggtccacacgacgttggattcgagagtcttgtcgttgtagtgctccgtgaactgattctcgtggcggtcggtcacggcgaggcgcttgcactggatgtaggcgcgccagccggcctcatgggagtcgtcggacacgagggccctgtagcggtcggtcgcttcgatggtgacgacgttgcggccgtcgacggtggccgcagagagggtgaagaggtcgccgccgagcttcgagctgtcgaaaccggagccggcgatcctgtcgcccttggacgcgagggcctcgccgcctgaaagcaggtcgcgggtcgcgtacacggcccattggccggtgtattcgtcgaaggccggatcgagggagtcgacgatgtcccacttgtcgacctgcgggtaggcgcggttggccggcaggatggagctgtcgagctggtagaggaagctgcggcccttgtagatgctcttgccgttggcggatgcgccgccgaccttcacggtcacgtccttggccgggttgatgggcttcagggggttcgtgacctcgttggtgtccttgcggatcttgttgagcacctgcgtggccttgttcttcacggtgtagccgtcggtgaccttgatgacggtcatcggcatggtcacggtgtacgtgtggccgaggagcgtctggtcgatggcgggctgggtgagcgggtcatgctcgtcggactcgctgtaggtcttgaggtcttccggctgtgggtcgcccttgacggtctcgcccgtcgcggggatctcggtgtcgaccagcttggcgtaggcgtagagcgcgccgtccttgtcctggatgttgaacttgtcggtgacgtccttgccggtctcgtcggtgatctccacgttggtggcgtcgagtttcaggtactcgtcgtcgtagtcgtcggtcatgccgagcctccagaccttgtaggcctggttgtcctgcctggcgtcgagggtgacgcggtagtagatctcgtctcccagcagggcggtcttgccgtcgatgctgatcgtcgggtccttctgcgtgtccttcttgacggggtcgagcttcggcgggatgttgaacacctcgttgctcggggtcagcgagttgttgagggtcagcacccacttgttgccgaccttgtggtcggtgggggcgtcgtcggcgacggttccctcgaagcggacctggaggcgggggctggtgccggcgcgccactggctgatcgtctcctggtcggtgacggtcagggtgaacatgtgcttggaatcatcccacgtggtcgtgtacttcttcttggacaccggcttgccggtgttcaggtccatcatctccagggtctgcttgtccggtttcagataggcgtcgtaggagtcggtgaagctcacggacttgacctcgtaggcgaggtcggccggcagttgcggctgggtgttgagctggtattcgaccttctggccgggctggacgactttgccgtccacgctctcctggtcgccgccctggctcgcctcggacacgacgtccttcttgaccggcgggatgtagccgcagatctgcggttcgttggtcggctcggtgtggttgttcacggtctcggagccgccgttggtcaggttcttgccgttcggggcggtgcagaaggtgagttcgtcgcccgcctgcttgccgaagtccttgcggacctgggccgcgcccttgccgtccgcgaagttgatcctgccggggatgaggagcgtgacctgcttcgggttcttcagtttcttcaatcccttgaggtaggaggccttggcggtggcggtggccttggtgccctggacggtgatgtcgaactggtcggtcacgtccttgccggtgttgacgatgtcgctcacgctgctttcgcggtcggtgccggccgtggcctcgtacacgcggatgttcttggtgtcggcgtcgaaaatgtagtcggcggcagtccagtcatcggtgagggtgaactgtttcggcgcctggatcaggttcctgccgacggtgccgttgacgacgctgccgacctcgccgccggcgaggtaggtgtgggagtcgccgccggtcttgttggtctcctgcgggtcgatgacggcctgccattcgccgtcctgctcgaagatccagctcttgtcggggttgggctgccaggtgtcgaattccttgctgccggcgtcggcctcgggttcctggttccacttgccggtcgcgtggtccttgaccttcctgaagtccttcggcttgctgacggtgacattgaagctgaactcgtactggtggtccaagggcatctcgcccttgtcggccgtgcgcaccgccgagacggtgtccgtcttgcggtcccaggtgatggtgaactcgttggacgcgtcgcggtcgttgtcggtcttgtcgacgagcttgtagtcgtcgacggtgtagtcgacgccgttggccgtgatcttgtccttgaacgtcatctcgtagccgcccttgccggtgccgtaggtgatgacggtgcggttggtcatgctgtcggcgctcacgccctcgtcgatggtcttggtcggcggggtcggcggttcggcgctcacggtccaggtctcggacgggtccttgtcggtcgtgtcgacggccgcgttcatcctgccctgcttggcgacctggatatcgatccagtactggccttcctgccagtggctcatgccgaagtcggctggcgtggcgaggttctcgagctgggtgtctcccgagttggcgaaggtgattggcttgctgaccgtcttggctgcgacgtagccgttcttctggccctcgtagtggatgacggcggtgccgttcaggttctctttgatgctgctgccgttgttgctcgcgtgcagggtgtcgccgatcgggtcggtggagccgaccttcaggttggtcctctgcttgtgcgtggtggtgacggtcaggtcgtagttcggtggggcgggctggtatttgtcgagcgcgatgatgacgatgctggccgtgctggacacgtaccgttccatgagcttgtccacactcgtggacggatcgtcatcaaacgcggtagaggtcttatagtgacgagttccagcgtagttgtaatcgcctggtgcgatgtacttgttccagttgtccaaccatatactcacgtcggcgatgccggatccgttccatacgctggtggtggacccgttgccggagaccgcgccgaccgcgacgacgcggcagtcgccgtcgccctcgcccggatggcgctggtggaaaccggcgacgcaccggctgttcgcgtcggccagcgcggcggcggccttgccggacgagtcgtccatcctcacgcctgcgttggccatggcgcggctcacgctgttgatgtcggtcgccgggccccatgaaccggacgcgtcgtccttgtactgccagaactgcgttgccgcgccgctgccgccggtgccgggcctgttgccgcccccgccaccggcgtatgcggtgcccgcggtcagaccgccggccagggtggcaacggccgtcagcaacgccaacgtcttccgtttattattgatgtaacccaatgttcctctcctttcagagattctgcacctgactgtgtcggggcgggaattgcgatccccgaccgataccattgcaacccggtttcacggactccggtttggacattcgcgcaggaaacaggaaagggccgtcccacggatgttcgtggaacggccctgaaagagaaacggagtcgaccggcttaatgttggattgggatggagcaatcctccaaactacaggcacctggatcaccgtgtccgccgctggtcggccccgaccagcctgacccaccggacgacgagccgcccgtcgaaccagaggatgcgcctgccgaaccgacgtttgtgtaggagcggcccgaactcgtgccggtgttcgtataggacggcgtgtacgactgggcctgccgttgcgactgtgcggccgcagcggcggcctgggccgcggcctcctgttcggccttggccttcgcctccgcgtcggccttctccttcgccaccttcgattcgttcaccgtcttcacggccttgccgatggcatccgcgtcacgctttttgatggcgtccagcaggcttgcgcgggtcttgtcgtcctgcaccttcccggaggtcgcgtcgtagagcgcctgcgcgtcgtccacggtcttgtcgagtttggacgattcgaccgccttcacggccttggacagcgtcttcgcatgcgtcttgtaccatgccgcgttcgccgtgatggcctttgcggcctcctgcacgccggtcctcgaatccgccttgcaggaaacggtcttcggaatcgtggccttcatcgtcttggacagggcgtccagcatcttcgcgtccttcacgcttttcctatcggtcttcgccgcgtccgccgcggacccgttcagaagcgtgttccagtcgttcgtcgcggtgcgcaggcgttcggatgcggccgcgcaatccgccctggcctcggccatgaggcggtccgcgtgcgccttccaggcgatgcctcccgccgtgagcagtgcgagtacgacgacggtgatgacgatggcccttctgcgatgcggcttctttgttttcttttccgtggactcggccgaaacttcgatggtctcatcttcgatggccttttctttttctgtcatttgttctccttgttcataggttcacagcttatcgaatcggcggagccgtctgcatcgttcctccggcgcgtgccgcgcatggacgcgccggagggccgcatcgagatccaaatgaaaagattcgggacgaggaaaagcagcgggacggcccgatggacgacggtctgggccgagtccatcggagcgaaggacgccacgaggacgagagcgtaggcgacgacgcacaggcggcacaggccgcgaaggctgctggatccagcgcgccgggcgacggtttcggccatcacgcccatcactccgcacaatgccacgcgagatgtgttttgtcaagttggagtaggccgtttcggcgtttcttttagtccatgtgagcggcgggtttcaggccgtttcggcgttggccggtcctgctggttgttggttattgcattggttattgcatgagggcgtgggtcttgcgccaggattcgccctcgaagcggatcatccgtccgtggtggacggtgcggtcgatgatcgcggcggccatgttggggtcgccgaagatcctgccccatccgctgaactcgatgttggtggtgtagatgatgctctgggtctcgtacgcgttggtgacgacctggaacaggagcctgctgccgtcctcgtcgatgggcacgtagccgagttcgtcgatgacgagcagcggggtcctgccgatcgcggcgagttcccggtcgagccggttgtccgattgggccctgaggagccgcatgaccaggcctgcggcggtgaagtagcgtgcgggtatgcccttgcggcatgcgttcctgccgagcgcgatggcgaggtgggtcttgccggtgccgggagggccgaacaggacgaggtcgtcgtggccggcgatgaagtcgagggtcgtgatctgcccgcgcccgtagtcgacggggaagcggatcggggtccagtcgtagccgccgagctccttgtcggcggggaatccggcggccttgagcaggcgtgagcgtttggagcgttccctggattcgatctcggcgttcatccacgattccatgaattccatctggctgggggtcgcgtccgcgagctggtcggcgaggacctggcgggtcagaggcagccgtctggccagggtcatgatcgttgcgattctttcgccggtggacgcgcgcctgcgtttcatgtcgggcatgacgaccggcggacggtgggttcccatggtcaggcctccttcctttcccatggctgtcggggtttcatgaacacgtcgtatccggtcaggtcgggtaccgactgctcgtacggcttctcgccggcggcgatgcgccgggccatggtggtcacactggcctcgtcgatcgcgtgcccctgttcgaccaggtgctctccggcccggacggcggcctcgaagccggacgcggcgctggccttggcgatgacgcggaacgtggtcctgcgtgtcttggcgtccatgcggtcgatggcgatcctgagtttgtcggggaaatcgtcacggatggtggaatcggtccatgcgtgggtcttgcggctcaacgcgggcaggagcgtggcggggttgcgcaccgtggccggcgaatccccgtacacgcgcggcagtctggcacaggtgcgtccgtcctgggtgcggatcgtcacgtcgaacgcgcgcagacccacgtcgagagtccagccgcgccacgaggggccggcgaggtagtagttgccgtcgatctgcacacgcccgtccttgtcggccttcctcacctcccaacggatcgcgtcgtacggcttggcgggaagcggctgcatatccatcttctcaccggcgaacaggccgccgatcggcgcgcccttgcggtaatgcgtctccttggccatcgcgtcgcaacgctccagcatgtaccgggtcagttggccgtgggactctgcgttgagcatgggcaccatgatgttgcggcgcaggaacccgaccgcgttctccacgctgcccttctcgttgcccgagttcgggttgcagaacctggtctccagccggtaatgctccacgaacagttcgaacacgtgcacgacggtgaccttgtcccacgcgatccgatggccggcgccggtggcgttgtcaagcaccagcgtcagggggaccgcgcctatgtgctcgaacaccgtgcgcagccccgcgcacacgcattcggcgttctccccgggcagggccacgcagtagcgcatgttcgaatacgggaacgtgacgaccaggcaatgcacgtcgacccggtccccgccgaccacggcctgcgccatgccgaaatcgacctgcgcctcgcccggatgccacttgagctccagatacccgtccgacgggaggcgatgctcctcgcgccaccgtttcacgtaccgctgcaccggcgaatacgagccctcgtagcccttctccgacacgagtctgtcgtacacgcgcttggcggtgtgccgctgcttgcggggcatgaaccggtccgcctgcagccacccgtccaccgtcgccctgaacggatcgagcttcgacggccgcgatacggagcgctccggtccgggagagcaatcctccctcccggcgtacttcgcgaccgtgtcgcgggccacgcccacctctttcgcgatgctcctccatgacatgccatgcgcgtcaagcaccctgatacgttgttgtacggacaccggtaccgtcattcctttcctttcccgagaaaaccgaacggtttgactttcaactcgggaaactagtccaggcaggacgggccggtgttcgtttctcaccacacgctgaagtggaccagaacctgccgctcacatggaagacatccacacgctcacacggcccactttctattgaacagacacagcgagagatgcagaccagcagtccgaggagcatgatgcggttcatcgttcccctccaaagcccaggtacgtttcgagggcggcatcgatcacttcctggatccgcatgtcgtgctcggcggcgaaggtcttgagcctgcgccgggtcgaggcgcgcaggctcacgctggtcttcacccagccctccacgtcgttcggtttcacggtcttccggtttttcggtatttcggtttccgccgattccggtcttccggtatccgccggtgccggccggccgccggtgagcagcgcggtcaggtcgcgcggacggggcgtcaagttcatgttcctcacaggtcctcccccttgagctgtcgcatggtctgcttgagttcgccggacaggtcgcggtattcgtgcaggcgggacccgcgggggcgggtggatttcgcgttgaggatgtcctggcgtttcgggatcagcgtctcgaagcacgcgatgtccgcggcgtcgacccaggctagggcgtcgcggagggcggtcgtgttggcctcggtgcggcacaggaggatcgcggcggggacgccgcgacggtcgcacaggtccttcaccccgacggcctggtcgaggtcgatgcggctggggctcgacgggatgaccacgaggtccgcgttgttcaccgattcgtccaacgcgcgcccgtacggggcggagtcgatcagcacccagtcgacggggtcgtcgagacggccgttgatcccgtgcaggtgcgcgatgtcggccggcgcggcggacatcacgtcgaacggcagcgggtcgtccagctcggcggccctgtaccaccagtccttcgcgtcgccctgcacgtccgcgtcgacgacgagcacatgctgctcgccccgggactggtccacgagggcgcaggccaggaacacggcgcttgtggtcttcatgctgccgcccttgccggtcgccaacgcgatcaccatcggctcgcggttcttcttgtcgttcatcggtttctccttatttcggtatgtcggtatccggtttttcggcattctggttagttggtttttcggtatttcggtttatgccgcgtcccacgcggatcgcgacgggaagcggtcagaagaggctgccctggaccaggcccttcggcacgggctcggtcgggaggaacagcggatcgtcgtgcgtgtattcgcggcgcgagcgttggcggcgtttggcccgtcgccagtagtcgcggccatcacggcgcatgcgttcggcccagtccgggtggtcggccagccagtcacggacccgactccgtgggatccggtgcagaccgccgtcggcgatgtggaggtcacgggcgatcagtcgggcgaggatccagcggctcgcatagtcgagcccgccgtacacggccttgtccttccagccgttgacgagagcgcggctgatgcagtcgaggcgcatggggcacgcggcacacagcacacagcccttggcgcgcatccgctcgtcgatcaggtcccggccgtccgggtccgtcacggtgttccacattcggtcggcgaggtccgggctgacctcggcgatccgggcgcaggcaggcatcgtgtcgcggtcgttcatggccgctcccccaccggctcgacgccgtcgcgccggttgagctcgtccgcgagcctctggcacgccagctgccattcgctgggattgccggtccggtacgagccttcgtggtcgtattcgtcccagtgcggtttcatcgcctcgaggacgtgctggcaggcgaaggtgtgcgtgtggggcgccggccggtagaccagcgagcacggcgtgggcttctcgtccgtcctgcggtcgcggtcgcgggccgcggcgtcgtgctcgcgtcggcgttcgagctcgctgatggtccagtcgttcgcgatccggtcccagtccgcggcgaggcggcggggactgtcggcgcggctgagccagtacgtgttcgcgggcagccagtcgatgaccgcgaggatgagcgtcagggcggccgcatggtcgccgtcgtgcgcctcggtgacgcggtcgacgagcttcgagacgcggtcgcggtcccggccggtcggcgtggcggtggacagcgacagcctggagcggaccgccgcgagacggtccagcacgatcgtggtcccgtcgtcgtttttctcgtcccttgcgggggtcgccccgcctgcggggagatgccccgtaggggcagaggggaaggagggtttactaggagggtttacctggagggttttatccttatatatacagctctgcgagatttgcagtgctggggatgcggcatttgcagtgctgggggtgcagctctcgcagtgctggccctgcgggatttgcagtgccggttccggccctttttccagccctgcgagatttgcagtgctgggaatcggcttcgttccagcgttttccggagtcacgcccttggattcgccgttctcgaacacggttccggcctccgggtccacggtcttgcccatggtcttcgggtcgtgttccgccgtgtgcgtctccttgatccattcgagggtcgacgggtcggattcgaccgcgaggtcccacacgatctgacagtactggggcagacggttcctgccgcccttgccgaggcgcgcgtaccgttggtcgccacggcgaatgaagccgcgttcctggagagtcttcaacgcggtgcgcacggtccgttccgagagttcggtgacgttgacgatggtcgcgatcttcggataggctgcggtgccatcgtcgtccgcgcggtccgcgaggtagacgagcacggccttcgcgctggcgttgcccacatggcatttgaaggcccatgacagtgcgatgttgctcacggacgctcctcctcacgctgctgggcggcacggcgttcgtcggccaatctggcggccatctcgtcgccgagacgtgccgcccggcacagggccagcgtcatcagccacgagaacgcgacgaacacgatcaatacgattgcaagccagttcacgcgagtctcccttccatggacgggtgcgccatcatcgacgccaggcgacgggaatcaacggagcccggaccgttgtggcgggcgaatgccaccacgaccgggaacgtccaaaccgacgcctggaaatcccggttacactcgggaaacacagagcaagacatgcggaatgctttagtaaagtcgttcatgtgtgatcactactccaagacaatgcattgggcggccacggaccgggatccggcaagatacgggatccgcggccgctcggaatattggttgcaccgcccgtccccgacgttccagcatcgggaacgggcgttttttcttttagctgcagagaaagagagagaatcgaatgggatcagaccatcgcaccacctccctcgccgtcgacgggccacgcgccgccgcaacggatggcgaggcaaaggcaatcaagagcctgctcatcagggacatcaaagacttcgatcaaagcgtcccagcagtcgtcagacacgacgatggaacgatcaggcctacgtacataggcgtatggggacaggaccgtctgataggcgcggccctcatccagccagccctttgcgtagccgagacgctcatataccgcaccgggacgagcggggtccatgccgcacagatacgagaggctttcgccgagcatgcagccatcatcgaagggatcgcggtcgtcagaaagcatcggcgcgaaggcttcggatcgcagatcaaggcgttctgcgactcctgggcggcagaccacggcgctgaactgatactcagcatccccaccaacgagggcgcgcgcctgctcaacgagaaagccggatacacggtcgtaccgcccgacggatatctcaccatcaaggtatttgacgctcaggaacagcctcttcacattccctacgccgaccagcggacccaagacagaggcactagcatgtgggcgtacaagctcgtagggcaacgcacacagcacttcgagattggcgttctcaccgcctcctgaagttccgaagaccataccgtcgatgaatgttcccgacgggtcgcgggagaagacgagtcttccggcttcgtcgctcatgccgttctcccctcggtcagcagcaggtttgccaccacccgttcgcgggcggagagctgtgcatcgacctcccggaaggcatgcgtgtaggcatgcgtggggtggagccaggtgtcggccagtccgcgggtctcgccgcggcgcagggcgcgcacggcgcaggccgggcagagctccaaaatctccgtgtcgcccggcacacagtagttgcgccagccgttacgggcgaaataagcgtcgcgggcggccgaatcgtagtcgtcccagaacgtgccccagaccaccgtgtggcagccatcgcacaccgtgacgcaatcccaccggctgtccggccattcggactgttcgtagattccaccagccatcacgcaacctcctcatgatcagcatcaagccccagcaaatagtcggtagacacacggaagtgctcggacaacacaacgatgtctgaagttgtccagccaatgcgtcccaagagttttccattcgccgaagttttcgataaaccaagcaatgaaccgagttgggcacaagtaagtccctcactctttaccagagcacttatcctttgggtcactccattcatagttctttctttctgacttggttcatttttactgtacttcactatagcgtacagtttgactgaacgcaaatcgtatgagacacttaattaagaaattctgaactattttgggaagtgatcatatgtccacatcggaagtctcgccagaaacacctttggataaaggacagcgtgctgaagcggcgatcccgaccaacgtgagagtttatctaggactaagcggaaaaacacaaaaggcacttggagaagctttgggcattaccaagagtgctatgtccatgaaaatgtgtggcaaagttggatggtcagtaagcgatcttgtaacgaccgccgattttctaggtgtcacgccgagcgctctaatggatgacacaattctcagcaaagccgaggctggatatgcaaaatcggccgagtatggagtttttgccgagaagccaggtgctttggtaggtgccggctcccccaggttccttgtcagtcccttcaaccccgacgccccggtcgagggtggaatctcaggtgcagctaaaggtgccttggccggtttcgtgccgttcggggtcccgtccggctcgggttccccgtccagcccctcgaagcatgacgggattggggtttccggccggtctcaagcccatgagacacttaagaccatgactacagttatcatgcatacctctgagggcagcatcaccatcaacctgttcgacgacaaggctccgaacaccgtggccaacttcctgggcctcgccaccggcgagaaggaatgggcggacccgtacaccggccagccttcccacggcaagttctacaacggcctgaccttccaccgcatcatcaagcagttcatgattcagggcggttgcccgctgggcaccggtaccggcggccctggctacgagttcgacgatgagatcgacccgagcctgaagttcgacaagccgtacctgttggctatggccaacgccggtctgcgtcgcggcatggacggtaaggtccatggcaccaacggctcccagttcttcatcaccaccgtgccgaccccgtggctggacggtcaccacaccatcttcggtgaggtcgccgatgacgactccaagaaggtcgtcgataagctcgaagcactggacaccgatccgatggatcgcccgctcgagccggccgtgattctgtccgtggacgtggcggagtaagaccgacaacatatacgaaaaggtcctgattctgaaccgcaccccgattgttggactgaagtaattcagattcgatgatcggaggtgcggtttctcatgtgtagggatcgcaggcgtcattacgatgacggtttcatgcgggtcgtcgccgacctgatccggggcggggccgggaggcgttctctcgcccgccggcttggcgtgcccgtcagtaccgcgggaaaatgggtgttgtcataccggtttggcggggaggcggcgctcatgggagaacgcgaaggcaacaggagatacgactacgagacgaagctcgcggcggtgcgcgaccatgtggagcatgggctgacgaaggccgaagtcatggagaagtacaggatcgcgggtcccaccccgttggagcgctggtgccgcgagtaccggtccggcggcccggacgcgctgcgtccgaaaccgaagggcaggcccaggggcgcgaaatccaagccgaggccggctcccacaagggaacagctccttgaggaggagaacgcgtacctcaaggcgagggtcgcgtacctggaaaaagtcgacgccctgctggcgtggagatcggcaaccgggacagaacggtgatcgtctccatgctggcggggctgggacatcggctccggcacctgctcagggcggccggactggcgaaaagcacgtattaccatcttctgtcgcatccggccgccgtgacccggccggacatcgagccgatggtcgccgagatattcgcgcgcacgcccaacgggtgcggccaccggcagatacgcatgtgcctcgtgcacgagttcggggtgcgggtgagccacaagagcgtgctgaaggtcatgaggcgcatgggcctggaatgccggatacgcaggccgaacccgtaccggaaatacagctcgtaccgggacgagacgggcgcgagggcggagaacctgctgaaccgcgacttcacggccgaccggccgtgggtgaagctgggcacggacgtcaccgagttcagggtcgccgacggcaaggcgtatccggctcccgtatacgacatgggatccaaggagatcgtggcccgggacgtcagccggcatcccgacatggcccagcagcggcgcctgctcgccatgctcgaggagaagctgcccgaagacgccgacccgatcccgcactccgacatgggctggcagtaccggcaccagtggtggcgcgaccggctcgcgggactgaacatccgccagtccatgagcagaaagggcaactgcatcgacaacgccgcgaccgagcaggtgttcggccacctcaaggacgagttccacgccggacgcgagttcgcctcatacgaacagttcaagaacgaactggacgcgtacatcatccactggaacaccaaacgccgccagatacgactggagggacacaccccggaggaattccggaacatgtcccccacagcctaatcaggtacccttaataaaccacgtccaacaatcggggcgcagttcaggtattccagtcaggaccttttcgtgttcttggctcccctctctgagagggagccagagtaaggtaacggcctacttcatcttgcgcagtcgaggttcggcggattccttggcaccagtgatgcggtacacgtcgaacacgccatcaatcttgcgcacggctgccagcaacgagttgagatgctgcggatcggccatttcgaagctgaactggctggtggccacgcgatcggaaccggtggcgatcgtaccggaaatgatgttcacgccatggtcggaaagcacacgtgtcacgtccgaaagcaggtttcgtcgatccagcgcctcgacctgaatcttgaccatgaacaggcccttggtgctggtccattcgacttcgaccacacgctcaggctgcttgtttttcagatcgatcatgttctggcagtcggtgcggtgcacggatacgccctgattacgggtgatgaagccgatgatattgtcaccgggcaccggcatgcagcaacgggccagcttgatccacacatcgcccacgcccttgacggacacgccggtggagctgctggaggccttgcgttccatgggcttcagcggcaggacttcctgctcgacttcctcatcgacctcgtcggcacccgcatccttgaccagatgcgagatgacgttctgcgtggagacctgtccgtcaccaatggcggcgaacacggcgtccgcgttcgggaagttaaggtcgtcggccacacccaccagtgcttcgggcgtaagcaatgtgttgaccggcagattgcgcttgcgcatcgcgcgggtcagctcgtcgcggccctcctcgatggcttcagtacgacgctccttggagaaccactgacgaatcttgttgcgggccttcgggctcttgacgaagctcagccaatcgcgtgacgggccggctgtatcggatttggacgtcagaatttcgacggtatcgccattatcgagcgtggtgtcgagcggcaccaaacgaccgttgacgcgcgcgcccatcgtacggtggcccacttcggtgtgcacggcgtacgcgaagtcgaccggcgtggcgtgagcgggcagggatacgattttgcctttcggcgtgaacacgtagacttcggacgagccaaggtcttccttgagcgagcccaagaattcgttggaatcaggggtttcgctggtccagtcggcgagctgctgaatccatttgaggttatcgacctcggaaagctcctgattgttttcatcacgctttcgatcggacttgtccggcgagctcagggcgcggccggcctggccgttttccttgtatttccagtgcgcggcgatgccgaattcggcgcggcggtgcatgtcccaagtgcgaatctggatttcgaccggcttgccaccggggcccaccaccgtggtgtgcagcgactggtacatgttgagcttcggcatggcgatgtagtccttgaatcggccgggaaccgggttccaccgcgcatgcacggcaccaagcgccgcatagcagtcctgaatggtgtcgacgatgatgcgcacaccgaccaaatcgtagatgttcgcgaaatcatggccgcgcacgatcatcttctggtagatggagaagtaatccttcgggcgtccggtgacgtatgccttgatgttctgctcgtcgagatcctcgttgatctccgccagaatctgcttcaggtacacatcgcgctggccggctcggcgagccaccagcaccacgatctcgttgtagatcttcgggtagagcaccttgaagctcagttcctcgagctccgtcttgatggcgttcataccgagtcggttggccaaaggtgcgtacacgtcaagggtttcacgcgccttcttctgggcggacgtggtcttcacatagcgccaggtgcgagcgttgtgtacgcggtcggcgagcttgaccaccaaggtacgcacgtcgcggctcatggccaccacgagtttgcgaatggtttcggcttgggcggaatcacccacttcaagctgactcagcttggtaacgccatcgaccagaccggccacggtgtcgccgaattcggcgcggcattgatccaacgtatagtcggtgtcttccaccgtgtcgtgcaacaggccggctgccaccacgatcgggcccatgcccagatccgcgagaatctgggaaacggccagcgggtggatgatgtacggctcgccagacttgcggcgctgggcggagtgctggatgacagcacgccggtaggcacggtcaagaatggacaaatcctcatcggggtgatgggacttgcacaccttcttgattggatccagcggattgagcggatcggcactgatctcacaacccaacttacgggcggcgtactgctcgccatcaatctctgccatgccagtcacctccctcgtcatgaagttcattgtagccgcgaaccggagccttgtgcattcacctgttcgccatcattggttccacaaccgttgttgccgtcatcaccttagtcattcaaccggcctaatccggtcaggacgccactcccgtcgaaccgaacccgcgttcggcgcgatcggatccgggcagtgtctcggccgggatgaaccgagcctcaacataccgctgaatcaccaattgagcgatgcgatcgcccggatggaagacggcggtgtgcttcggatcgaggttgatcagaggcaccttgatctcgccacggtagccggcatcaacggtgccaggcgcgttgagcacggtgacgccctgcttggcggccagcccggaacgcggatgcaccaacgccacgtagcccgcaggtagggcgatggccacgccggtgggaaccagtgcccgttcaaaaggcttcagcgtcacatcgacggtggtgatgaggtcggcaccggcatcgcccgcgtgggcatagtgcagctgggccggatgttcggggtcgaggctcttgaccaggacctcggtggattcgggctcgttgtaggtctcgtcgaacgccatcaggcggcgcactcctcacacaccggctggccatcctcgtccgtgtaggcgagctggctgcgatgcttgaccaggaagcactgcgagcagatgaactcgtcaccctgcatggggatgacggtcaccgaggaatcctcgttgctcaaatcggcgcccggcagttcgtagtcttcggcgatggcgttctcatcgtcgtcgatgtcgctcgaggcgttctgcgaggacttccccagcgcctgcagcgattcctcgtcctcatccttgttgcggggggaatcataatcctgagccatcatggtcctttcgtcgtctttggttcgtaagtcgatatatatagcacggtcagcgccgtactcgcccataggatacacgatttgaaatactcgtaaagttcgacacgtggggcatacttaaaagaagtaatgtctttgcgacggaaagtggtgcgaatatgccagatgatcggcttgaaaaagcccgtttcgtgcgcgtgagcaagacgggggacctcgtattctcccttggcggcagggaaatggctgtgagcgtggacgacacgctcgaacgggcgattcttgaggccaagcaggtcagaagcgagatgcgacaggctccccagccgcatcagcagtccactttgccgatttcccagatacagtcgctgattcgcgccggtgccgatccggcccgtgtcgcggagaaatatcatctgagcgaaatgctggtacgtcgtttctccatggctgtggagaccgagaaacagtatgccatcgaacagttccttgccgtggcggcacccaaagacagcagggtgcgcaccatcagcgaactggtggaacgcacgctggcctctgcgggaatcggcatggaatcagtgacctggaaatccacccggcgcggacttgagccttggcgcatcgtggcgatattcacttccgcgggccgtgagatccatgccgaatggacgtggaatatgcacgacaattccgtgatgagcctgaacaatgccgctcgaaaactgctcggcgaacagaatccggaatcagccacggattccaaactcaagccgacgattcctgaactgcccggcgactccgtacgttccgcgcgtatcgagcgcgccgtgtctgcttgggcggcgcctacgccttcgattccggccgcacggcctgccgcgatccggccctccgtcacttccacaggttccatgcccccggtggacctatccacgtccatctcaccggccacgaaccaggctcatgacgctacggcccccagcccggtctcttcgcagaccgccggacctgtttcgtcatctgccgcaggattgcagcaatcgcctgccacggcaccagagcagggttctgacaatatttcggacgagaccgtacggcgtggccccaatgcacagctggtagccaccgagcaggagcgggcggccgaatccgccgccaccaaacacgaggcaccagccaaaccggccaagcgtaaatcaggacgttcggccgtaccaagctgggacgagattctgttcggagactgaatttccgaatcaggccatatcgatcaggcagggaatatccatttccaatgccgtttgggagccatgcacgctcggcaggtgggtggctttgtctccttgcgtacgcgaatcgacgagggtcacggctcccgctgcctgcacgaccacatcgccgagcatcggccggactcgctcgcagaccggtccaaacaatccgtccgcgatggcctcatccctggtccgcaccaaggctcggtcttgcaggtaatcgcgccaccggcaagctatatcttcaggtcgttcatccggctcggcatacagcatcagcgagcgcggctctcccccgaccagtgacacgcctcgggtgagctgcggttcaacggcgatgtcaatccgctggcccatgtcggtttgcaccatgccgtggtcggccacgatgacgatcagcgtgcctttgggtgcgctgcgtttcaggagcgcgagctgggcgtcgatatgttcgaatgcggccacccagtgttcggaatcccacccgtaattgtggccgactttgtcggcgtcacggatgtacaggtaggtcaggccgggggtacgggaggcacgtgaggcggccagcacacgatcgcgtggggtgacgttgccttgatagtcggtgcctcgcaatgcagcttcggtcaatggcgatttggagaacttgggcaaccccgagcttgtgacgcgcacctcttgagccgcaagtttctcgaacaccgtctcctcgcgctgctggtcgagcggatcgaccatgggtggcacaggaatgtgcggattggctggtttgggtgccagcgcgtctttgaactggatgagttggatgagcttatggctggcgggttcgagctgcgtatagcccgccattgcggtcagtcccgggcaggttccggtaccgaatgcggccatggccgccacagtggtgcttggagcgcaggtggcgatgggacgctgattggcgcgttcgttcatcagcgaacgcagatagggcgcgtggccgaggcgcatggcgaggttccagaagcccaggccgtccacgagcaccacgatggccgattcggcgtcgggcagtcccaacgcgcgctggcaggccttgggatcggcgtggaccttggtgggagtcggatgcccaatcgcggcggacaaggcgggcagcacggcggacaggtgcagtgctcccccacgccgatcggccggggcgtcatccccatagcccacagtgggcaccagccgcagcaactcgtccatatccggcgtctcaacactcatagttgcccattcaagtagcacccctccccttggctcagtgcgcagagaacggttctcaataacaactgtgcgctccaacgcacataatcaaacaaacgcacatcgactgaaacactggaatcacgccgttttatcggcaaacatgtgcgattggcgcaccgaaaccagcgcacagttgttattgagaaccgttctctgcgcactgtttcgcgccctcccgctaatatgggggcgttcgaaagggagtttcatggcatcacaccgcaaaccgtccgcgcaaacctatgatccgcgcacggtcaaggagcatatcgtcgagacgccgctgaacgaggagatgagcaagtccttcctcgagtatgcgtattcggtgatttacgcacgcgcactgcccgatgcgcgcgatggcttgaagccggtgcagcgccgcatcgtctaccagatgggcgagatgaacctgactcccgaccgcccgtatatgaagtccgcccgcgtggtgggcgaggtgatgggcaagctccacccgcacggtgattccgcgatctacgaggccatggtgcgtttggcacagccgttcgcgatgcgtctgccgctggtagacggccacggcaacttcggctcgctggatgacggccctgcggcctcccgttacaccgaggccaggcttggcccggccgctctcggcatgaacgcggatatcgatgaggacaccgtcgacttcacgccgaactatgacaacaagctcaaggaaccgaccgtgctgccggccgccatcccgaatctgctggtcaacggcggctcgggcatcgccgtgggcatggccacgaacctggccacccacaatctgggcgaggtggtaaacgccgccaagttcctcatggcgcattcggacgccaccctggaacagctgatgcgttacgtgcccggccccgactggcccaccggcggcacgatcatcggccgcgacggcatccgtgaggcctatgccactggccgtggtacgctcaccacgcgcgccgccacgcatatcgagcatgtcacggcccgcaagcaggccatcgtggtcaccgagctgccgtacatggtgggcccggagaaggtaatcgaacgtatttccgacggtgtgaagaaccgcaagctggaggggatttccggcgcgttcgatctgaccgatcgtcataacggcacgcgtatcgtcatcgagatcaagactggtttcgacccgcatgcggttctggtgcagttgttcaagcacacaccgttgcaagacaacttcgccatgaacaacgtggcgttggtggagggccgcccgcacacgatgggtctgaaggagatgcttcaggtgtgggtggaccaccgccgtgtggtgattcgccgccgcagtgaatatcgcaagaagaaggcgctggagcgcctgcacctggtcgagggcctgctgctggccatgttggacatcgacgaggtgattcaggtaatccgcacctcggatgatgcggatgccgcgaagagccgtttgatggtcgttttcgatttggacgaggtccaggctcagtacatcctcgacctgcgtctgcgccgactgaccaagatgaaccgtatcgagcttgaggccgaacgcgatgatctgaagaagcgtatcgaggagctgacccggatcctggcctccgccgaggcgctcgaccaggtggtcaccgacgagatggacgaagcggtcgccaagtggggctcgccgcgccgtaccgtgctgctggatgccgacccggatggcacgttgacgccggtcgtggcgcagggtgccggggcttcgggcgtgtccaagtccgcgctcgaagcggtgaaggccgccactacgatctcctccgccgaagccgatgtggccgcagccgcagctgcggccaagaagaccggcgaacagtccacgctgaccggagccttgaagatcgaggacgagccgtgcgtggtgatgatgagcgctaccggtttgattgcccgtaccacgccaagcgcgatggacgtgttcaatgcacgatccacttccgatgagcgtttgagagacgatcagatcaccacaatcttcgagacttccacgcgcgctacgtatgggctggtcacgtcggccggccgcctggtgctcgcgcatgtggttgatttgcctgccttgcccgctgccgccacattgtcgctgaagggaggagttcaggccgacgaactgatcggcatgaccgaatccaccgatccgattcgcggtgagcgtgtgattacggcgattgccatggagcagccgacgtccggcaagaccagtgccaaggacgagagcgaggatggcggggccgccgaggccaagccgttgccgtcgctggctatcggtacccgtaacggtgtcatcaagcgttggaatcgtgaggcccccaccaccatggattcttggcccgtcattgatctgaaagatggcgacgaagtggtattcgccgccgaggccgaggatgacgaccgtctggtgttcatctcctccgattcctcgctactgacctttgaggcgaagaacgtgcgcccgcagggtcgtactgcgggcggtatggccggcatcaagctggccgagggcgcccgtgtggcggccttcaacgtggttcccgccggcaaggtggcatggacctatgaagagggcgagaacggcttgacttccggatccggtgcagtggtgctcaccgtggccggcgattccgatgcactgcccggcaccgaaaacggcgcggcgaaggtcactccgctggaaatgtaccccaccaagggtcgcgctaccggcggcgtgcgttcccagcgattcctgaagggccagaacacgctgattcttgcctgggtgggcctctacccgttgcacgcctctacatccgcaggctctccggtcgagcttcccaagcccgatatgcgccgagacggttccggagtagacctcgcctcccccatcgccttcattgcgtaacctcaattaagctccctctgatgggccgagccgtaaagcaaacaccccagtggggtgtttgtaggcgaggagcgaacgatagtgagccaaacaatagagaagagaccctaaacccggcctacactaagcattaaggaggtggcgatgagactactggttgccgtatccaatgaaccgttggcccacgccattcatggtgccctgcttgccggtcgtcatgaggtgtctttggcaagcaccggtagtatcgcgctcgccgctgtcgccaaggagtcatttgacgcagtgattcttgatgaatccctgctcggcatttccaccgagcagctcatcgaatccctacgcaatgcccgtgcctccgtcaagattctgctgctgacttcgacgccactcagcaaaaccattggtgaaggcagccgctggcgagcgctgcctgacgagtacgcccctatcgaagagacgccctacagctccttcagcgcgaattcacgcgcaaacaactcagatgccgaagccgaacaacgctcggacaatgctgcctctagcgcacaagctaacatacgacgcccagatgccgcgctgagcaaaccattctccgatggcgaactgctctcatacgtcggctcgcttgccaccgactcccccgccatgatcattcgtggcaatctcacgttggacaccacgaatcacaaggcctactacgcatccactcacagcgcaatctcactgtcccgtctggaatacagtttgcttgaagcgctggtcaaggctgatggccagttcgtcaacaccagcgagttggtcaaacttatcggcggcccattcttcgagcaacagggcttactcaagaacgccctctacacactggataagaagctcacccgcgccggcctcatcatgacccaacgaggctccaactaccgcattcgatagctgggctcaatcagtacagccgcatgccttggggaacgggggtgaagccggactggtggaggatgcgggcgaaggggtgacgggcgttgaggggttcgccattgatatcgctgaatgtcacggagccggtgccattgcgtttgagggcgtaggccagttctgtggcggccttgcgcatttgttcgtcggaatcattgacagcggcttcatggccgaccgattgatcgaacgctgtcaggtgcttggctttggcggccgcgtatagtagcgcgccttgcgcattgagcacgaccgtggctccgatacggcgtgccggtttacccgcaccggcaggcgcgtccggccacgcgatggcggagccactgagatttgcggggtcgagcacactcaatgccaccacggactggccacgatgctctgacggatgacgcaacgcatccacggtgtcgcgctcggcaaattgggccgcgccgaaaccacggacgaacatgcctcgtaccagtcgaccatgctcctccatgcgattcaataccggatacaacgctgagtagccacccgggatattttccttgtcaatcaccggctgcgcgatgacgccatacctgtccagcaacgtctcgaccagtgcgagtgcccgttcggtctggtcggtgtcttcggcttcagcttgcccgattacggcggaccacaaacctcctaacgtcatatccgtagtggctcggcgaatcggagcgacacgcccacgacgacgtgatgtagtggatttacgcgggcttgctgcgcctgcggttaatgcacgcaccggcgcgaagctggaattggtgaccttaccttgccagaccaagctccacaaggcatccttgaactgctgttcgctccactcttgcggaatgatttcgccggtgtttggattgatgtccggctccgcggtctcattccacgcacgtttggcggcatccatcagttgacgggcatggaacgctccccctgagtccagtgcggtcagaatcgcttccggcatggtggcgtctgaggcgttcgatgtcgtaccatgttccacaccgctgaacaatattgaatccgccggatagaaagcaacctcaccggggtccatcgcactggttcccccggtttttgagccgacccagaccacatcgccgctggtcagcaactcatccagcaatgcaggttggtagtctcgtactcgtgcggggaatactgccgactcccagagtgcagtgggcagtgatatgccctccagctgctcgataacgcgcatgagcccgtcagcaccttcatatcgttcgccgccgaccggcccgataccttgtcggtcgataagaaacatctggaacgcctctgattctactggcttgactgctttacgcgccttggccaatgagcgagaccgaatacggcggaatacgtccttatggagccactgttggccttgctcgtcatcatctacaaagtggccttgcagcaactcgcctttggcagccagcacatccagagtgtgcacggcatccgtagcatcgaggtgtagatcggctatgagctgatcggcggtgaaaggaccatgggttttggcgtaacgggtcacgcgaccagtcacatcatcgtcggcaagctcattccagaaagtgtgctcccccagttcctgttcgacttcgcgaatcacgtccgggttgagcacttgtgccatatcggtggtgccgagcaagcgttcgagcacgtgcggatcgagagacagcagttgcgcgctacgctcggcctgaggttggtcatactggtacatcaccacgccgacgaagccaaagagaatgttctcggcgaaaggcgatggcgactcggtttccacgtccttcacggtaatggtgccggcttgcaatccggtcatcacctcgttcagggcgggcatgtcatacacgtcctgcaaacattcacgtgcagtctccaacagaagcggaaagttcttgaccacgcgagccgattgcaggagctgtgcggctcgcaatcgctgctgccataggggtacgcgacggcctggatcggaacgaggcatgaacaacgaccgagcggcgcactcacggaatcgagccgcgaataatacggattcgcccacctgacgttctacatccgtttgaagatcctcggaatcgaaaaggaacagatcctgagcgggaatatgcccgtcgccatccggcagctggatgacgatgccatcatcagcggcatatacctgcccgtcaaaaccataacgctggcgcagcctgcgactgatggccatggaccacggttcatgaacacggcggccgaatggactcagcagtacgatgcgccaaccgccgtcttcatctcgcgtgcgctccacaacgagggtttggtcgctgggaaccgtaccagtggcggcttgttgttcggagagcaggcgggccaagttggtgatggcgttgacatctaggccgtcgtggtggagacgggtgaggattgttgggatgaaggttgggacagctggaccttctgcggcagacctcccctcagtccgcttcacgtctaatccggcggcgatttctcgggtgaagcgggctatggtacggctgaaaccgtagtcacggccagcgccttcaccgtgccagaacggcagacgggcggtgcggcccggagccggagtcacgaccacacgatcacgggtgatttcctgaatctgccatgtggaggtgccgagcgtaatgacatcgcccacgcgcgattcgtagaccatctcctcatccaactcgccgacgcgacgctggcctttgccggcgtccgcctcaggcaggaccacggtgtacagccctcgatcgggaatcgtaccgccagaggtaacggccactttctgcgaaccgggacgggcggaaatcaggccattatcccgattccataccagtcgcggccggaaggccgagaattcctcgctgttgtattcgccggacatcatgccgattaccgcatcgaacatgtcacgtggcagttcggcaaacggcgcagcacggcgcaccgtggcataccagtcatcagcgttcaaatcgtgcatcgcggcagcggccacggtctgctgggcaagaatatcgagcggattgcgcggcacggccaatggttctatatcgccggcaatcatggcttccagacttgcggtcccagtgacaatctgctgacgggtgagcgggtagaacaatgcgtgagagacgccaccgacctgatgatcggcacggcctacacgctgcaatccggaggagaccgacaacggcgtatcgacttgaatcaccaagtcgaccgagcccatatcaatgccgagctccaaactggaggtggccaccacgcagcgcaattcaccacgtttaagccgttcctcaatcattttgcgacggtctttggaaaccgacccatgatgagccatggcgatgacatcatcgccctcatgtgagccgacaagcatggtggtggagccgaccacagcatcgtaatgcgtggagaacccttcgcggccttccggagagcccagatcccgcacagtgtcgggattggtgccatgccgggtctgcgcatacagatcgttcaagcgcgcagtgagtttctcagccacaccacgcgaattaacgaacaccaatgtagtgcggtgcgcgagaatctcatccaaaatactgcgttccaccacgggccaaatggaaccggaggtacggtcgcccgccgctccaaccaacgcggaggaatcgaacgcatcactcgcatcagaatcgtccccagaagtggaagaaacatctctatcatccaccggcacaatgcccctgcgttcagcaagtcgctgcatggccggcgtgacaccactgatatgcggagcggaccgttcagcatccacgtcaccgacacgctgcttggcattcacggactgcaaatcacgcatgttttccaacggctcaatcatgcgcaaatccattgcaggccgcccaccgggattcacgatggtaaccggttgcccgccgcccaggaatcgcgccgccttttcaggcggattcaccgtagcggatagaccaacgcgctgcatatgacgatcgccacggccagcatcaacggcggcatcaccgccctcatcagcatctgcatcgattgcatctcgcttgcgcgattctgcgacaaggttctccagccgttccagacttaccgccaaatgtgcgccgcgcttggtgcccgccactgcatgaatctcatcgacgatcaccgtatcgacagtgccgagaatccgccctgccttcgaagtgagcaacaaatacaacgattctggcgtggtaacgaggatatccggtggatgggaggctatgcgccgccgctcctgtgcggtggtgtcgcctgaacgagtggcgaccgcgatcttcggcacgggcagcccttgcgcctcgcattgtgcagcaatgccctccaaaggctgttctaggttcttggccacatcggccgcgagcgcctttaacggcgagatatacagcacacgcacaccggcacgccgcgtgcgtggcacggtcatcaatcggtcgatggctgaaagaaacgcggccaatgttttgccggaaccggtaggggcgatgaccaagacattgcgaccggaatggattgccggccatgcctgagcctgtgcctcggtcggctgaccgaaggcatgctcgaaccacatcttggtggggtcggaaaacaggctcaggctttcgtacatatgtacgattataggtcagctgaagtaggcgatgacttcttcggcggtgccgtaggcactttgggcaccgagcttggtggccgcataggcggagacgtaggagccgatttgcgcggattgcagcagcgtatgaccggcggccaagccagccagaacggtccccatgaacgagtcgccgcaaccggtggtgtccactgcattgacttgcgcggcggatacgcgatgccaacgtccgttctcgatcaccaccgatcccgacgcaccaagcgtcactatcgcccggtcgaatccgtaatcggtgaatcgttcggcgacctcataccagtcgagtgattccacgtcaccatccggcagacccagcagttgagccacttcatgctggttgaccagcagaatatccgtggcttccaccagttcgtgaggcagctcgtccataaatggcgagtcgttgagcagcacggtcacgccagcgtcatgcgcggtctgcgcggcggcgataacggtggcaatcgggctctccagacacagtcccaataccgcgcattcggcgatggtcgtgcgatgtgattgcacatagccggcacttgccttggcattggaacccggcgaatagacgatggtgttctcgccctcagcgctcacggtgattaccgtggtgccgctggggccttcgacatgcaggatatcggcggtgtcgacgccggcctcatccagcttgcttaataggaagtccgcgttggagtcctcgcccaccgcgcccagcaactggacattgacaccgagacgagcggcggcagacgcctgattcgcgcccttgccgcccggcagcactttcatggcaccaccattgacggtttcacctggcttgggtagtcgtttagtggttacggtgtaatcggcgttcatcgagccgaccacgattaccgagcccggcgcatccttcagcgcttccaatcgttcccgtacgggctcgggcatctgttcatgttcttcttcacttatcaccatgggctccaagcatagtaggcgacggacccaaatgcgcatatgatcagccgcgcaacttgcgaagacgctcgtgcatggccaccatcagcaccaagagcaccagcaaataccacgggtagagactgattgtcacatattgcgcgatgatgccgaacagtggcggcatgagcagtgagcccacataggcgcaggccatctgcacgccgacgatggcctgcgatttgtcttcgccgaagtaggccggcgtcgagtggatgacgcacggataaatcggcgcgcacccgaggccgatgaccaccagcccaacgaccacgccaaggtggtgaggcaatggcacgaacatggtgaggatgccggcgaacaccagcacttggccgaggcgaatcatgaccgggtccttgaatcgcatggtcagaaagccggaaagcgcacgacccacggtgatgcctacgtagaataggctggcccagctggcggcggtgatcttgtcgatgccgctgtgcatcaccatatagctggaggcccacagacccgccgtggattcgacggcgcagtagcagaagaacatcacgaggatttccttggcaccgcgaatggcgagcacgccggccacgccgagcggtttgcgttcagcaacagacaccccttcagcagtgccaaatctctcggcattgccgtcagatgatgcggtgtcatcggtcgattcgccgaccgcaattgcgccacgtttcttccacagtggcaggctcagcaccaggatgacggtcagcatcacctgcaggatcgcgatgtaccgatagccccacggccaaccttggccttgagagagcgcatagcccatgatgtaggggccgaccgatgcgccgacgccccacatgcagtgcagccagctcatatgccggctttcgtagtgaatggctacgtagttattgagcgccgcatccactccgcccgcgccaaggccgtatggtatggcgatggccaacagcacccagtaattcgaggtaacggagaaaccggccaaggccgccgcagtcaacgccaccgaaacggcggtgaccttgcctgccccgaatttcaatgtcattcggtccgaaagcagcgccgagacgatcgtgaacatggaaatcaccgcggagatgccgccggcccacgccaccggcacgttcagatcctggctcatggtgggccatgcggatccgagtagcgaatccggcaatcccagactgataaacgccacatagatgacggcaagcaacagactggccatgtcccatctcccattcacagtacggcaccggttgtgataacgatgtcatcagtctatcgaatagcgcttcagcaacacgcaaacatcacagtttggagtcttgcccgcagtacaccggcgtggaatcggctacgccgcgcgggtcaaagccgatgatgtcgtagttgtccttgagataatcggcggcggtgcactcgatgaaatcctgatgatataccgcagcaccctctgacgaaatagctgtccgccaaagacggactgaggggagagaaatacgagtagcccgttaccacccgaggcctctcccccagtcagcttcgctgacaccccctcatcagagggagcttgagataggacggtcaggtatcgatcttggagcggtcgaaatcgtcggcgttgtcgacgatgaactgcttgcgcggcggcacgtcgtcgcccatcagcaggctgaagatctcggatgcctgggcggcgtcctccatgcggatgcggcgcagcatacgcgtgcgcgggtccatggtggtgtccgccaactggtcggcgtccatctcgcccagacccttgtatcgctggatgtcgtcgttgtatccgatgcgcttcttgtcgaggtcggccagtttgccggccagctcgtcatcggaatacgtgtagatatattcgcccttgtgcgagcctgtcaacgcgatgcggtgcagcggcggcacggcggcatacacgtagccgtgttcgataagcggccgcatgtaccggtagaacagcgtcagcagcaggatacggatgtgcgcgccatccacatcggcatcggtcatcatgatgatcttgtgatagcgcgactgttcgatgtcgaagctctggccggagccggcacccaccacttggatgatggccgcgcactccttgttggagagcatctgcgtgatcgacgccttctgcacgttcagaatcttgcctcgaatcggcagcagtgcctggaaaccggcgttgcgggcggccttggcggtaccgagtgcggaatcaccctcgacgatgaacagttcggccacgtcgtcattgcccggctggcagtcggagagtttggccggcatcgaggcggattcgagcgcgttcttgcggcgcgtgacctccttggccttgcgcgactggatgcgtgcgtgcatttcgccgacgatcttctccagcacgcggccggattgttccttgtacccgcgcttggagccggtgatcatctcgccgaattgcttgtcggtgagccgggtgacgatcggcttgacctgcgcggtgccaagcacgtccttggtctggccttggaactgaggttcggccacgcgtgcggtgaccacggccacgagtccggcttggatatcgtcgcgctccaccttcatggcggagtccttcatgttcaccttgagcttgcgggcgttgtcttccaccgccttgcgaatctgcttggtgatggcgttcatgaaaccgtccacgtgagtaccgccgccgggcgtctccacgatgttcacgaagctcatgattgtggtgtcatagccgttgacccatcgcagggcgatatccacgccgcaggtgcgttcgatttcctgggcgtgcagttcaccgcccttgcccacggcctgggtctcctccttataggtgccctcgccttggatgcgccagatgtcggagatcggctcgcctttggacaggaagtcgacgaagtccttgacgccgcctgtgtgcaggaattccacgacgcgcgggtgcgcgggctgttcgccgaacgcgccatcaacgacctggtcgccggccgtcagtgagaagtcctcctcggccgggctctcggcatcgtcggacgagacatccaaggccggtgcctggtcttgcgcaggttcgactgttgcgtcatcagtggcctcgacggtgtcagtcgccgccgtttccggtacgttttcgtcgatgatggtgattttgaggccgggcaccaggaagctggtctgacgcacgcggtcgatgagctgttcgtatgagaactcggcggttttgttgaagatctccggatcataccagtagcgaatacgggtaccagtggttttgggagataccttgccgatgatttccagctcggtgggtcggttcttgcgagtgcgcttgaacggggaatcgggagacggattggccgggtcggcatccgtgtatacgccagggtgaccttggtggaaggtcatgtggtgcgtcttgccgtcacgatccacttcgacgtccagtcgggagctcagggcattgaccacggaggagcccacgccgtgcaggccaccgacggcgttataagacgagttgccgaacttggcaccggcgtgcagtttggtcagtacgacctccacgccggacaggccggttttcggttccttgtccaccgggatgcctcggccattgtccgcgacttccacggaaccgtcggtgtgcagggtgaccacaatgtcgttgcagaagccggccaaggcctcgtccacggagttgtcgatgatctcccacaggcagtgcataagcccctgcgagtcggtggtgccgatgtacatgcccggacgcttgcgtaccgcatccaagccctcaagaacagctaggtccttggcaccgtattcttctttgggcatacagtcctatttttctcttcaaatgcttggctcccctcacagaggggagccagatgatcattgatccaggaagtcgcgcagggtctgcgaacgggatgggtggcgcagcttggacatggtcttggactcgatctgacggatgcgttcacgggtcacgccatacacacggccgatgtcgtccagcgtcttcggctggccgtcttccaggccatagcgcatcttgatgacgccggcctcacgcggagacagggtttccagcacctgcttgaactgttcctgcagcagggagaaggccacggcgtcggacggagcgatggcgtcggtatcctcaatgaggtcaccgaactcggaatcgccatcctcgccaagcggggtgtgcagggaaatcggctcgcggccgtacttctgcacttcctgcaccttctcaaccggcatatccagctcgcgggccagctcgtccggcgtaggttcacgccccagatcctgcagcatctggcgctgtacacgggacagcttgttaatcacttcgaccatgtgcacaggcacgcgaatggtgcgggcctgatcggccatggcacgggtgatggcctgacgaatccaccacgtggcgtaggtggagaacttgaagcccttcttccagtcgaacttctcgacggcacgaatcagaccaaggttgccttcctggatcaaatcaaggaagagcatgccgcgacccgtgtagcgcttggcgagcgagaccacaagtcgtaggttggcttccagcagatggtccttagccttcttgccgtcggcggcggcccacttgagttcacgcttgcgcttgaactccatgccttcgctttcggtgtcgagcaggtgctgggcgtacaggccggcctcgatgcgctcggacaggtcgacttcctgctcggcattcagcaggctcacacggccgatctgcttcaggtagtccttgaccgggtcggcggttgcgccggccgcaatcacacgacgcttcggattgcccgaggggatgatgttttcttcctcatcatccgtgtcggagaccacgtaggcacccttttccttgggctgctcgggtgccttggacttggcttcttcctcgtcctcgtcgtcttccacatcatcgtcgtcggcatcgtcctcatcgaggtcttcgtcgtcggcatcgtcttcgtcaacgtcgtcaagatcctcgtcgaggtcgtcaacgtccaaatcgtcgtcgttgacctcggcatcgtcatcaagctcgtcatcgacctgagtgtcctcgtctttgacgagctcatcgtccttggccttcttcgcggttttcttcgcagcggacttgcgcgtggtctttttcgagggctctgcggacttggacttcttggcggaagtcttgcgtgcggtggtcgtagagctggccttcttcttggtctcggtctcctcgctggactcggctgtctgcttggttgccgtcgtttccttcgtggccaaaactgctcctcctgatctctcgccgtgaagtgcatataccacatgggcccacttctggcaagggcaaatcgtcaactatgtgagtaaaccaccctccacggacgattattcccacatcgttgcccgacgtgttgccgatcaccacacgctttccttccgcgcatcgcgcgtaaaacctcggaaatccgccgtttctgttcactcagcccgagcaccatgccggtgccacgcctcgatcggcggctgagaatatcatcgccgccagcgaacaatcctcatcgagcagcaggcatcgcaaggcgaacaccattgctcgcggatcgcccagccaccataaggtgtaggcgattacggccaatggctgtatgcagtacggcaccggtgaggcttcggcgatatcgagcaacataccgatgccggcatggcaacgctccttatccggcatcatgccttcatcctcgaatgcgcaagtcagcagctcgcccattcgtgttctcgtacgcgccagatgcggtcgcgccgcgaattccataagccatgacttggggcaacggctttcatcaataaccaacgagagaatcagcgcatcacgaatcgataaggtctcacgcatgcccaccgcaaacgcggccatcgtctctcggcctaggtcggtgttcccggcatcaagacaagacagccattcgtccaatggttcggccacccagtcggcattagcctgttgcgcgcctcgaagtcgtcgatcattgcgaaattcctgtgatctcgtctccaactcgtcaaagccaaagggctccgtctgcacggcggcgtgccgtttggcgtgtcggctcttacgcggcttgtgcggcgtgttgttgttcatcatgtcctccttgactaatggtgtgcaatctattggtgttgtggtgcgcgccgagccggatagctcatgcgccgagggggtgtgtgcccactatggctgaaaacgccgtatgacgcaggaaaaaacgaccattgtggttctagcttcaaaacccttgattcccaacgttcttgtgttcttcaaaccctgtggataagttattaggcatgtgcacaactgctaacaaccgcgaaatcatcgagccacgcatcattcagttggtgcgggaactgactgccgcccccgccaccgacgaggttgccgacgccctgaaaccggtgatggaacaggttgtggaccaagccgcctcctccagccaaggaggcaaacgactgcgtgcgctgctcgcgttggacgccttcgatattcttgccggcgacgtgacgcctgatcggcgtgacgccatgatcgacctggcctgcgccattgaagtgtttcagacggccgcactggtgcatgacgacatcatcgacgaatccgatctgcgccggggcaggccttccgcacatcgtgccttggaacaggccgtacacagcggtgccataggccgtggcttgggcctgatgctcggcgacattctggccaccgcctgcattgaaatcacacgccggtccgccagccgtcttcccaacaccgatgccctgaacgaggcgtttcttaccatgcaacgcgaggtggaaatcggccaggtactggacttggccgtcgagatgaccccactgtccaatcccgaagctctggcgaacgcctcattgaacgtattccgctggaagacagccagttacaccaccatcgctccactgctgcttgcactgctggccgcaggagagagcccggatcaggccaggcattgcgcgttggccgtcggccggccgctcggactggcgttccaactggcggatgacctgttggatgtcgtcggatcaagccgcaataccggaaaaccagttggcggagacatccgagaaggcaaacgcacagtgctgttggctgatgctctgtctgcggcagatacggcggataaggccgatctgattgccatcttcgaagaagattgtcgcaatgacaaccaggtggcccgcaccattgaactgttcacgtcgaccggtgctcttgatcgatcccgcgagcgcatcgctgccctatggggtgagtcccgtaaggcgattgccggtcttgagctgaattccgaagcgcaacgccgtctgaccgaggcttgtgcgcgattcgtccccgaatccttgcgatagtccacaatgcgagccgccggaccatgagaccatgaacaccggtgaaaacccgtgaaagctatgcgctgatgctccggccgcgtaaccggggccatgtacactgaacatgtttagtcgtgattaaaggaaccgtacgatacaacatgagtgagaacgagcccgcacagatgattgagggacgctaccgcatcgtgcgcaatatcgccgagggtggtatggccaccgtgtatgaggccatcgatgagcgtctggggcgcaccgtggcgattaaggtcatgcacacacaactcgccaaaggcccgcatcgggagcagttcgtcgaacggttccgccgcgaggccaattcggccgcgtccatcgccaacccgcacatcgttcaggtgtatgacaccggcgagttcaatggacttgattttctggtcatggaatatgtgcatggcgtcaatctgcggcatgagatgaacgcccaaggcacattctccgtacgtgagacgctgcgcgtggtcgcggagacgctggatggtctggcttccgcacatcgcgccggcgtggttcaccgtgacatcaagcccgagaacattttgatcaatgatcgcggccatgtgcagatcactgatttcggtctggccaaggccgccagccaggccacattgagctccaccggcatgctattgggcaccgccgcttatctggctcccgaaatgatcgagaacaatcaggccaccgcgcaaggcgacctgtattcggtgggcatcatggcatgggagatgctgaccggcaaggtgccgttcgattcggataatccggtgacgcttgttttcaagcatgttcatgaggacgtgccgtccgtggccacggtctgtcagggcattgatccgtccgtggcggcgttcatcgcccatctgaccgcgcgtcaggtggatgcccgccccaccgatggcgcggcagcagctgaggaattgagccagttggccgccaaattgccgctggaggcgtggcaataccgtttgcatgccgaacccatcggaggtgatcataccgatgccaccgctgcagcgctggtaggcaatatcgccgagcaggccccgctgaccggcgtacctgccggtgcagcaacgttcaagccgtccgtaccagcgtttttggccgatgatgtcgcaagcaataccgtcgataccggtggcgccgcagacgtcaatcctccggctcctccggtcgcccccaccacggcacttgattcgtcgacgccagccgatgcttcggctccccataagacgcaaatcatggcacagtccggcagcgagacacaagtgctgcctcaggccggcgatgccttcacccgagcgcttgccttttccgatgagccggacgtcgcttccaacggcaccgggccaaagaagcagcgcagcaaaaaaccgctcatcatcgtactggtgatcgtgctggtactggctgcaatcggcggaaccgccggctggtggtggtttgccggaccgggcagctattggagtgtgcccaagccggatgacgtgacctgcgatgcgaatgcaagcaccgaatgctcgttggccggcgcggattgggccacgtatgagagcacgttgaaggctctcggcatcccctacaagacgcacaaggaatacagcgacgacgtggcggaaggcaagatcatctcttcttccgtgaacaagaccaaggccgttgtgaacagccgcataagcaagcgagccaatcaggagcttacggtggtggtgtccaagggcgtgcggatgaccaccatcccgaaggatattctcgacgcgaattcggccaatggcaaggacccgttgaacgcgctcaagaaggccggcttcgataatgtcaagcatgacgagtcgaaggatgagtattcgatggacacgccgcagggtgtggcattgacgatctcccctgatcccggtaccacggccaagcacaacgatgaggtgacggttactttgagcaagggaccgatgccggtgaccatgcctaacatcgtcggtaagacccaggatgagatgcaagccgcgctcggcgagttgaagctcacggccaatgtcaccgaacagtacgatgacaaggtcgaggccggtcaagtcatttccgcgtctcaggaagccggagcccagctgaagtggggcgatagcgtggacgtggtgatttccaagggtccggagatggcgacgataccgtccggccttgtcggcaaacaggaaagcgccgtaaccaagacacttgaaggtctcgggttcgaggtgaaaaccgacaaggtgctcggtggcctgttcggcacggtacgtaccgtgaaaagcggcgatacggacctctccaacggcggcaagattcgcttgcgcgacgccaacggcaaccccaccgtcatcaccctcaccatcgtgtgagatttgaatgaggctccctctgtcttcagacgagggagcctcatttgttaattacttttcggcttcttcagcggcctgctgggccttgagctcggccttgaccttctgggcgtattcgttcacgaattcctgaccgctcattttctggattgcggtggaaacacgatcggtcagcgaacgcaaatcatcatgtgtaatttcatcagccggcttcttcgcaacctcaatcggcttgccatacagcaccttggtcttgcccttcttgggaatcgacgtgccaatcggctgcagcttgtccgagccgatgatggcggtcggcacaatcgggcaaccggtctcgagcgcaagtcgtgcgacaccggtgtgtcccttgtacagtcgaccatccgggctgcgcgtgccttcaatgtggataccgaacaggtgcccatcctcgataatctcgcgtgcgtgctcgagtgcgccaagcgacttgctgccaccagaacgatcaaccgggaacacgcccacggacgtgaaccaccacttcttgaacttgcccttcaatcccttgccctcgaagtattcggctttgcccatgaagtgcaccatgcgcgggcaggtaatcggaatcaaagcatcatcgatcaccgccagatggttggctgcgataatcgcgccgccctctcgcggcacgttattcagtccgctgacagcagggctcaaacgatgatgagcaatagggccgagacctttgacgaagaaccagtagagcacttggcattcctcccgcagacgaactagccattggccggtcgcctgattagagtgacagttatgactgagaaccagaatagcaatgccgacggagagcggccaacccccacgccgggcaacggacaggattccggtacttcatccaagtcgccaactcccggtgccgccggacaagccacgaatggtgccgatacaccgcaatcgtatgacgcgaacgatttggatgcggcgtgggccgcgttcgaagccgagcatcaggccgacttgcatgacgtggcttcctccaggcaggccaaaaagttcgagaagcaggccaagaaacgcgagaaggaggcgctgctttccgtagatgacttggatatcggctcgttcaccgatgatgctcgcccgagccgtggcggcaagaaaggcaagcagtcaggtccccgtgatttcaccggctccagctggctggataccgataatgtgatggacgcctatgatgatggcggcttcactcccccgaaccctgatcttggtccggtcaaagcgtctacggtactgctgacggcgttgcttatcattggtctcgtaggcgaagcggtgatgatattcatccccggcttgaacgcgattcctctcttgggcgcgctgctcaatattctcttcgggctgggcgtcattttgggcttgggtggattggtggccaaaatcctcaaccgcaaagaccgccccggtgatcagggcggctattacgacgacggcgcgagggtgtagctcgcgtaggctgtgtggttcttggctcccctctctgaggctgagccgttaagcaaacagcccagtgggctgtttgtaggcgaggtgtgagagatagcgaaccaatgtattgcgggcgtagctcgtccgtaattgcggccgagccacgataggtcacgaattgaagtcgatggactcctgcaactcgaaatagttgataatgaaggaaaggtaaacatattcgagcaaacccattccatatcacgccttggacttggcggtttcgatccacttgttgaacagggcttcagccttgccggagtcgacagcatcctcggccagcttgtaggcctcggcgaagcgctcggccagtgtgccgttgccgaccagattgccgtcagccacgatggcggaggcagcgttgagcagtgcggtggtgcgggacggaatgtccttgccggccaggaagtccttgaatgcgttggcgttgacgtccggaacgccgcccttgagctgttcgacggtaatcttggccaagcccagatccacagtcggatcgaactcggactcggtaaccttgccgtcgcgaatctcccagacggaaaccgggccggtgggggcaagttcgtccatgccctcgtgggaggtgtagaccaagccggactgaccacggctggcgtagacggcagccatgatcgggctcaccttgcggttggcgcagccgatggccacgtgtgctaggttggcggggttggtcaacggtcccaggatgttgaagacgcacggaatgccgagcgcggcacgaatcgggcccacgaaacgcatggccgggtggaaagtgcgggcgaacgcgaaggtgatgcccacctcgtcgcccacttcgccgacggcctccggcttcaaatccagcggcaggccaagggcttcgagcacatcggcggcaccgcacttcgaagatgcagcgcggttgccgtgcttgacgatcttcacgccggctgcagcggcggccacggagcccatggtggacaggttcacggtggcgaagccgtcaccaccggtgcccacgatgtcggtggtcccaccggaaacgttcagcggcacggcgtgggagaccatggccttggcggcaccacgcacctcgtcggcggtcagtcccagctgctgctgcatagcgagcgcggcacccacggcggccggattggcgttaccttgcatcaggtcgtccacgaaccactccgattcctcagcagtaaggtggtctcccccgaccagcttggtgagaatcgacttccatgtgatctcggccatgatgccctccttggcgtttcctacgccgtgtgatgtatgttcgccgctcattgtaatggttcgtcatttcaaggccctgaatcttccatattgcaaaatatggcgctattgctgttttcgtggatgtcggttcgtcgtcgagccgttggtttcgtaagcgtgaggggcgttcccgcgtattctgttttccgaccaaagaaatgaatcacgaagaacgcctgggcaaaagcccattcaccggattgccgaacgtcaaaggcacggttgcagaggatgcgcggatcacggattcgccgccgcgttccgaacccgtgctcgagatccgggtgcgtccacgtgcgggtatgctccgatgctcccgatgcggaaggaggtgccgcgggcatgaccagggcggcggcgtgcggcgtcgtggtcgcttccgtgccgtgggccgagccgggcagccggtccacacgcgatttcgaatcggaacgcgcgtggccgatgagcgtcgcgaaccagaagaccgtaagcggttttccgcacgtcgcgtggcgcgccgccggaagacgccgcccatagggtcgctgaacggttgaaagcgtcgatgccgtctccgttcggcggcctcacgtcgatcggcgtggacgagaccagctaccgcaaaggccacacgtgcatcaccgtggtcgtcgaccacgaacggcatcgggcgatatgggcgcacgacgggtacggcagggacgtgttcggcctgttcttccaaacgttgacgcccgaacagcgcgcctccatcagggtcgtcgccggggacggggcccggtggatcgactcatgcgtgcatgagtggtgcccgaacgccgaacgcgcgcccgacgggttccacatcgtcagttggacgagcggcgcgcccgacaacccacgaaaacagcagaagcctcttttttgtgctatcccgtaaaactgcgggacggcagctcattttcgccgtttgagccgtgccgtcccacatcaccctttgcggaccgtgacaccataacaccgagaatggcggaatttcaacgattccgtaattcgtactgcgggacgccacgctagtcaatcgattgacactcgtgccatcccgcaacagtgtgggatacgacgtcaaaatccgcgaaaatcgcgtgccgtcccgcgcgtacggcaccgcacgaatacatgctgatgaaccgcatagaaaatggctccccgtgtggggagccatgagctagttactaactagcgatgcgtcacttctcgttctggccgtggcacatcttgtacttgcggccggaaccgcacgggcacggggcgttcttgccagtgccagggaaggtgcggccgtcggcccacggcgtcttgagctcttcgctcttcggacgcttggaaaccgggaccttgccttcggcgtggctgatcggagccgggccggcaacaggcagcgtggactcgccggccccggaggcggctgcggattcggcgatcgcctgcttggcgtccgtatcctcgtcctcttcctcgacttcgccctcggcggcctcgaccacggattcgccgttctcgtcggggccggaggccacggcgatggtgtcggcgctttcgacggtctcctcgacctcgtcaacggcctcgtcggtggtggcgacctgcttgatgtcgatgtggaacagcagctggacggtctcctccttaatggcctcgatcatggagttgtacatctggtagccttcgcgctggtattcgaccagcgggtcgcgctggcccatgccacgcaggccgatgccgtccttgaggtaatccatctcgtaaaggtgctcgcgccacttgcggtcgagcacggcgagcaccacgcggcgttcgagatcgcgcaagccggtctcgccgatggtctcctccatttcgccgtactgctgcctggcgtcctcgacgatcaggtcgcgtacggcctcgacggccttcgcacccttgaggccgccgacgatcttcctgacctcgtcttcgtcgaccttggtggggatcacggtgttgagcgccttgaacaggccctcccaatcccagtccttcggtttctcggatcccttgttggcgcccttgatgtaggactcgacggtgtcggaaatgaaacgcaggatgtccttgtggatgtcttcgcccttgagcacggcctgacgctcggagtagatgacggtgcgctgcttgttcatcacgtcgtcgtacttcagcacgttcttgcgaatctcatagttacgggattcgacggccttctgcgcggtgcgcacgcccttggtgacggacttggcctcgatcggctggccttcttccatgcccttggccatgacctgggccaccagctgggtgttgaacagacgcatcagatcgtcttccagcgacagatagaagcgggactcgcccggatcgccctgacggccggaacgaccgcgcagctggttgtcgattcgacgggactcgtggcgttcggtgccgagcacatacaggccgcccagctccttgacttcctcgtgctcgtccttgacctgggtcttgatctcgttcagggtgcccggccaacgcttctcatactcttccggggtgtcttccggagagtagccctcggacttcagcttggcgtcggcaaggaactcgacgttaccgccgagcatgatgtcggtaccacggccggccatgttggtggccacggtgacggcgcccttgcggccggcgacggcgaccacggcggcttccttctcatgctgcttggcgttcaggacctgatgagggatcttggccacgtcgagcagagtggagaccacttcggagctttccacggaagcggtaccgagcagcaccggctgtcccttggcgtgacgcttggccacgtccttgacgatggcggccagcttctccttcttggtgcggtagatgaggtcgtcctggtccttgcggatcatcggcttgttggtcttgatcggcagcacgcccagcttgtaggtgttcatgaactcggcggcctcggtttcggccgtaccggtcatgcccgcgagcttgtcgtacatacggaagtagttctgcagggtgatggtggcgaaggtctggttctcggccttgacctccacgccttccttggcttcgatggcctgatgcagaccctcgttgtagcggcggcccggcaggatacggccggtgtgctcgtcgacgatgagcacctcgccctgggtgacgacgtagtccttgtcacgcaggaacagttccttggccttgatggcgttgttgaggtagccgatcagggcggtgttggccggctcatacaggttgtcgatgccgaggaagtcctcgaccttggtgatgcccgggtccaggatgccgacgaccttcttcttctcgtcgacgtcgtagtcctcgtcgcgggtgagcttcagcaccagcttggcgaactgacggtaccagcgggtcacgtcgccttcggccgggccggagatgataagcggggtacgggcctcatcgatgaggatggaatcgacctcatcgacgatggcgtagtggtgaccgcgctgcacgaggtcggccttctcccatgccatgttgtcacgcaggtagtcgaagccgaactcgttgttggtgccgtaggtgatgtcagcgttgtactgcttgcggcgctccggcggcttctgctcggtgatgatgcagccgacgttcatgccgaggaaacggtagatacggcccatcagctcactctggtagctggcgaggtagtcgttgacggtgaccacgtgcacgcccttgccttcgagagcgttcagataggtgggcagggtggcgaccagggtcttgccttcaccggtcttcatttcggcgatgttgccccagtgcagggcagcaccgcccatgagctgcacgtcgaagtgacgctggccaagggtgcgcttggagacctcgcgcacggtggcgaacgcctcgggcatgatctcgtccaggctcttgccgttttcgatttcctgcttgaacttcggggtttgggccttcagatcctcgtcagagagggcggagatctcgtcctccagagcgttcacggccttggccacgttctccagcttcttgagctggtggccttcacccattcgcagggctttgtcaataatatcgaccactgggttctcccttgactgataagtggtggtgtccgcgtaccagaatagcgcctcgcaccgtcagcagtcgaatttttcgacctttttacgaaaaaatggaccgcctccatattggaagcggtccatgcggtatcagctgatcgtgtcagcaggccttaccttcaggccttcttgacgttctccggagtgtcgatttcgaacacgccgtagctccaaccgtgacggtggtagacgacggacgggcgtccggtctccttgttcacgaacaggaagaagtcgtgtccgatcagttccatctcgtacagcgcctcgtcgatgctcataggctcggcgatgtgcagcttgcgacggatgacaatcggcgtatccccaacctggacctccacggattcgccagggccaagatcggaggcgaccgcagcctgcgggctgttgttcggctcttcctccggctcctccggctcgggctccggggcgataacacccagatccaccgggaccgggttcgcgtaaccacgacggtgatccttgcgacggtcacgagtacgacgcagacgcagcgtcaacttatccagcgccatgtccaacgcgctgaattcatcggtgctggaagcctccgcacgcaccacggtacgtccggcgataacggtgatttccacgcgcttggcggtatcggcctgacgcgggttgccctcatgggtcagcacgatctgcgcgcgctgagcatccggggcgatagcggtcacacgattcatcttggtctcgaccacatcacggaacctttgcttgacctgcgtgtggcgtccggtaacgacgatttccatgttgacctcctctaactcaagcggtgtaacccgctatatgtgttccgaacggcatcatcaccgaccgggtatgtttcattgtagacgaacaatgggtgaacggccggaaactcgcccagagaatatatgtttattcccgggcttttctctgcaatgaaacgatgtatatactggggctttggcagcagtctcctataagaagatttgataccggtttatcaggctggctcgtttgttcgtcatggtaaatactgcaatggataggcagcgttttcttgctctttctcgcacataccaagctcttacagatttgattcgtctccatacgacacgccgcaacacgcccgacacgccccatccgatattcggcgcgccgttcacgaatcgtccaactatgcccaaccatggagaaaacaggataaccgggcaacgtcatggcctcaccgcagggcgggatgccgccttttccgcaccttatgtataattgcaagcttgagacctcttgatggccgcggccgtgatcttcattgggatcggctgaggaacttccgggctccatagagcacgatggcggataacgtccgcccagggtgacctgagagatagcgcaacagagaacagaccgcccgtcctcgacgggtaagggtgaaacggcggtgtaagagaccaccgggcctctggtaacagtaggtcgcatggcaagcctcatcgggagcaaggccaagcagatggcggtaagggctgctcgcccgtgtcatcgggtaggctgctagagcctggcggcaacgtcaggtcgagatggatggccatccgtgccgtgcgttcgcgcacggcacgacagaacccggggtataagaggtctcatttttttcttggctacaccaacaattcggcggcgactcgacggagggtttcggggctgtggcctttgcggccgccggcggaccaaagccgacgctgacggacccgacgatcgaggccatgggttttgcgggctatttggcggcccaattcccatgcggcatcttcaaagatgccattttgctcagcttcgtcacacacctgttcagccagcttgcggtccacacctttgcgagcaagttccatgaccgcaccacgacggcccatcatgcgaccggcacaatagcgtacggccgattcggcataagcgctgtcgtcaatcagttgcacgcgaatcagccgttcgatgacctcgtccacgatcgcctcgccgtaccctttggcaagcaatcgttcgcgtaacgcaccggatgcacgcggggccgcgtccagcaaacgcaatgcagcctcgcggcaagcgtccaaatcattgggatcttcgacaacggcagcgtctctcccccgtcgagaaaaacgtcccgacggtttcgactgaacatgctgctcggcaatgggcatgtcttgcgacgcaacaggattgcgccgcaagaacgcttcggcactaatcatgttcaggccttagctgtgccggccttggcacgggtcgttttggcagcaggcgccgctgcggccttgctgtccttggccacgtcggccgcagcagcctcgctgacggcggccgctgctgcggcttcgccatcttccgcgaactgatcggcggaaccgatcagaccgaactcggccttgaccttgttctcaatctcctcggtgatggccgggttgtccttaaggaactgacggaccttctctcgtccctgaccgagctgatcaccctcataggtgaaccacgaaccggacttcttgaccacgccaacctgctgggccatgtcgatcaccgagccctcacgggaaatgccttcaccgtagagcatgtcgaattcggcggacttgaaaggcggggccatcttgttcttgaccaccttgacgcgcgtgcggttgcccaccgcttcgtcgccgttcttcaaggtctggatgcggcggatgtcgagacgcacggaggcgtagaacttcagagctttaccaccggtggtggtttcagggttgccgaagaacacgccgatcttctcacgcagctggttgatgaagatggcggtggtgccggcctgagccaacgcgccggtcatcttgcgcagcgcctgactcatgagtcgggcctgcaaaccaacatggctgtctcccatttcgccttcgatttcggccttcggcaccaaagcggcgaccgagtcgatgacgatgacgtcaagcgcaccggagcgaatcagcatgtcagcgatttcgagggcctgctcgccgttatccggctgggagacgatgagtgagtcggtgtccacgccgagcttgcgggcgtaggccgggtcgagcgcgtgttcggcatcgatgtaggccgccacgccgcccttcttctgggcattggccaccacatgcaatgcgagcgtggtcttaccggatgattcggggccgtagatctccacgatgcggcccttgggtaggccgccgatgccgagcgccatatcgagagccaacgaaccggtggaaatcacctcgacgttctgctcgggctggtcgcccagtcgcattgcggaacctttgccaaaactcttctcgacctgcgccagcgcggtgtccagcgccgccttgcgcttgggatcgagctcgtgcttgtcctcggctgccgggtccttggccggcttggtctcaagtgccatgatcttctccttgtcgaagtcgtgtgcgaatcggatgcctccaccgtatgacggacatgccatgtgaggcaatccaaaccaaccattgtggttccagcttgcccgagcttggccgcctggcctccttaagccctactgcggtaaggattatggcagatggcaagcaccctgtgcacacgtatgcggcttcttgtcactgtggataactataaccacacacacgaacatttgttcgaatttggcgtgcaacacgccgaaatcgccaatttcacgattcagcgactccgtaatcccgcagtgtcagacggcgggcatgggcggcgcgttatgatcgtggccccaacgcttggagtccggaacctccatttggtcgcagagcacattccagaccacgcgtggctcctcccccgcgtccagcgcctcgaccacggtcatattcgccagtttgggcatccgttgatcacgcgacagcgaacgaccgtaggtccgaccgaacacctcttcaagtaattcccagaattcccgttcacgcatacacgccagtgtgccaccaaccgcaggacagcaaaaacccgcatcggcacaagcgatacgggttcacagctaggcatagattacgggacgcggcttcacaccgccaaccgatcagccctcgaccgagtcgagataatcagccaccatgcgcagcatgcgcgaagtggagactccgagcgcatcggcgatggagctcagcagttcggagctggcttccttctgtccacgttcgacttcggaaaggtagcctagcgaaacgcctgccttctcggagacttcacgcaacgtgcggcgatcgcgcgtgcgcagctcgcgcagcacatgaccgatagcaccacgcagcgaaaactcgcgaggctcctcctcagccaccacgggctcggcggcggcagtcggcttgtacgacggcgaatcctcatcccacatacgttcacgaacggcttgacgctgatccttggccttcttggcggcctgtgccttgagcacctgctgctgggcgaacatcaccgcacggcgctgggccggagtcagttcacgcatacgggcgacacccggctgcacagccatcggcttcttggcggccacatccatctgttcgttcactcgggtcatcgtttccatcgccatcgccccttcccaggtcggttcagtgtttccactatgtacaacacgacaacccaacggttttattccttaaaacttgctgtgaatagactcaagttttgcagaacgtggaatacggtgaggcgacgaatctcttcgcgcatgccatcaagatggagttcgacggctttgagcacttcggcatggtccggggtgaggcttgcggggatgcgcaggcccacatacaccagtccggccggcttgtcaccgtccggaccggggccggccacgccggtggtggaaaggccgatgattcggtcgccgtattccggctggctgtataggcgagcggtaccgacggccatctgccgggcgacttcggggtgtacggcaccttctcgatccaatagggccttgtccacgtgcaggatcgaggccttggcattgatgtcgtaagtgacagcggagcccaacaacacgttggaggcgccgggaatacgcacgaacgcatcggcaagcaggccaccggtcagggattcagcgcaggcgattttcgtattgttcgcctcgcaaatcttgaggatgccggccgcgagactgtcgcacaattcccgcattggaatatccgtcacttccgcttcggggcgacgaacgtgttgtacaggtacacggcacccgagtagaggcacaggaccaatgccacgtagatgatggcgtaggtcaggaagtagtaagcggtcatccagaacggcgtggcttgtccgttacccagagaccagaacggcagcagcagcatggacagacccacgcactggaatacggtcttgagcttgccgggccatgcggcggcgatgactttgccgcccggacgctccatgacgaagaaacgcataacggtgataccaatttcgcgaatcaggaacaggatggttacccaccagccgagctcgccgaacgcggagcatacaatcattgcgccgcaagtgagcagcttgtccgcgatcggatccatgagcttgcccatttcggtgacctgattgtatttgcgggccatccaaccgtcgattttatcggtggacgcggcgatgatgaacagcaccgcggcgacccagcgcatggtcaggttgttctcaccccaggcaccggcgagaatgtcgagtgtcaggaaaaacaccacgagtacgatgcgcgagtaggtgaccaggttcggcggcgcgttccatccgtcgaacagcgatgatttgggcgatgactgcttgtccattgtgttctcatccatagtgttcacgttacccccacacttctaccttgagtgagtattggctggatattgactgccattattcgggaatcaggttgcgtgctgatggccgcgtggccgcgcttctctctccgccccttcggggcacctccctcatcagaggaaggtcgatgggtgaattattcgccgagttcgggctgttgcggggcggtggcttcgagcgagctggtttcgcctcggatgaaggcgagcacctgcggcaggtcctgcggctggacgagcacttcgcgggccttcgagccttcggacggcccgaccacgccacgcgattcgagcaggtccatgagtcggccggccttggcgaagccgaccctgagcttgcgctgcagcatcgaggtggagccgaattggctggtgaccacgagttcggcggcctgcagcagcacgtccatgtcgtcgccgatctcctcgtcgggctccatgctgtctttcttttcggcttccttggccatctgttcgatgtcttcgcggtatttcggcttgcgctgggtgcgcacgaactccacggccttgcgaatctcggattcggacacccacgagccctgcacacgaatcggcttggcggaacccatcggcaggaacaacgcatcgccctgaccaatcagggtctcggcaccgaccgtgtcaagaatgactcgcgaatcggtggcggacgaggtggcgaacgccagtcgggatggaatgttggccttgatcagaccggtgaccacgtccacggacggacgctgggtggcgagcaccagatgcacaccggcggctcgtgccagctgggtgatgcgctggatggagctttccacatcgttcttggccaccatcataaggtcggccatctcgtcgaccaccacgaggatgtacggatagggggccaccttgcgctgggagccggcgggcgcatgtaccttgccggcgcgcacggcctcgttgaagtccttgacgtggcggaatccgaagaattcgaggtcggagtagcgtgcatccatctctttgaccacccattcgagggcctgtgcggctttcttcggatcggtgatgatcggggtcagcaggtgcgggatgcctgcgtaggcggacagttccacgcgcttgggatccaccatgatcagacgcacctgttcgggcgtggcacgcatgatgatcgaagtgagcatcgagttgataaaactcgacttaccggaaccggtggcaccggccaccagcaggtgcggcatcttggtcaggtcggcggtcacgaagtggccttcgacgtccttgccgatgccggagagcatcgggttcgggtcgcccacggccttgtcggagcgcagtacgtcgcccaagtgcacgatttcgcgatcctcgttcgggatttcgatgccgatggcggacttgccgggaatcggtgaaaggatacgcacatccgaactggccaccgcgtaggcgatgttgcgctgcaggttggtgactttctccaccttgacgccggggccaagctcgacctcatattgggtgaccgaggggccacgcaggaagccgacgactttggcatccacgttgaactgttcgaaggtggaagtcagcgcccggatcacgcgatcgttggccggggtgcgcatcgcatggggctggcctttggtcagcaggttcaggtcgggcaactgatacggcctattggcgtcgtcgtctgtatcgttgccggcggtggcattcggctggccgcccgtattgggcacgccctggccgactccgctgccgtccgcatcggcacccgcgtaggctccggtcgcggctgccgcagccgcggcaccggcggctccggccgctcccatcgcaccggctgcccctgcgagcgcgacagtaccggcctgggcggcactgggtgcccacgggtcgtctaccgctcccccaccgggcatggcgacggtctggccactggtgatgacgcgggttcgggaagcgtcgccatcatctgcatcggcagcaggcgcagggctggataggtgcggacggccgtcgtacgaagacgatgcaatggttcgcgcaccgataatctcgccggtcatcggatcgaccaccggggtttcggcggtggcaccatgctggctggcggcacggtcgaatggatcgtcggcagcatacttgtcaagagttttgtcgtcttcggtcttggatttgcggccgaacagtcgtgcgaacaggctgggccgtgcatcgccggcctgatcgttgtcgcttccgtcatcgtcgccgtcatgcgagggaacaccgtcggcaaaggcgagagtggtatctcccacacggacctcgttggggaactggctggcgctcccatccgtctcctggcccatcggcacatacggtttgcgttggattttagcggcgattttgcgcgcatcctccggcaaatcggtgacgtgggtgccggtaatcatcagcaaggagaacaggccgacgaccacgaaaatgatgatggcaaacacgttggaaaggccccaggcgagcggtgagccgaggaagaagccgaacaggccgccggcggattgcagaatcgtgatgtcgaatccggtgtggtcggcggcgatcgccacgtcgatgatcgaacaaatcgaccacatgagcagcacccaaccggtgaccacacgcgggttattggaccctttaccggaattgcgcatgagtcggaaggccacggcggcgagcaacaccggcagcacgacgctcatcagaccaagcacaccggccgcgatggcgtgaagcagctggccgaatggaccgctgacgcggaaccattcggacgcgcagaacagtacggcgagcacgagcagcaggaagcacaaaccgtcacgacggtaggctggatcgtattcgccgacgccggtgacggcgcgtacgccggagccgaacgcgcgcggaatcgcgagcaggatcttcttccacaacggctcaggttcgaggtcaagctcgggctggaccttggtttcgccatcatgggtagacccgttgtctttggatttacggggtttggtgctgttggaggatgctgttcgtgccatatcgggtctgattctactagtacgggggtgcatggttggtgacgacaccgtgacgatatggtcgattgacgaatcccgacagccgattcgccgcgttcgtctgagtcgattccccgctgggacgcgaatatgccttatcatgggttgcatgacacccgcagagcgtgcgagcgcagtcgcatttgcactcaagaactgcgcactggaagcgatgacgccgggcgaggcaacgatgcgcgccgcggctgcctacgaacgcggcttgaagcccgtgacccatctcatcgacgtggcggacgaacagactgccatgcgtctgcgcgccgccgccgaccctgccggaaaggatcgtctggctgccggcagtctggatgatcatgccacggatcgggcggatgcggtgttcgcacgtaccgtgttgttggcggaacgtcgatggaatccgtctggcgacttggatgagctgaccgccattcataaggggctgttcgaaggcgtgtttgaggatgcgggcaagttgcgtacctcaaacaccacacgcgaggtgacgaacgaccgggctcgagccgcgaatcctgaggcgttcttcccggctgggctcattgagaccggcgcgcacaacatcgcgatggagttggcggacaagcgcaacctgcatgcgttggatcgcgacgtgttcgttcacgcgttcgcttctatttatgatgagctcggttatctgcatccgttccgtggcggcaatgcgatggtgctgcgtatattcggttcacgcttggcgcatgacgccggctgggatctcgactggggctcagtgacgcgcgaggagtatcgctccgccaagcactcggcatatcggggcgacacgtctgcactggagacgatgttcgacgcgatactacgcccggcgaatccgacgcgtgtgttcttgatcgccggctggaatcaggggcctgcacactgattgcgggtgattgcatcggcctttggctgattcctacgccgtgatatcgcccagatgatgctgggtgtattcgtcggctcgggcgtcgatcgggtcgtagtcgccggcgtcggcgtgcgcgataatggccatcgcgttgtcgaccagtttcgggttcagggcctgcagccagtggatgcgcgggtcacggccgaaccatcccatctgtttgcgggcgagtcgcttggttttctgtgcgatgtccgcgaaggcgtcgttcacatcccagatgccgtccagcaggtcgatgatctgctgatagccgagcgcacgtacggcggtggcacccagatgcgggcgcaaccgttcgacttcttcgatgaacccatcgtcatacatctgcttggtgcgcaaatcgatgcgatggtccaaatccgggcggtccaggtcgagtccgatctgcacggacggaatcacgtaccgatagcgcggcagactggccgaatacggtttgccggtaagctcgatgacctccagcgcacggatggtgcggcgtggattgcgtgggtccatgcgcgcggcggcctcggggtctttggcccgcaactcgtcgaacaaagcaccggcaccctcggttttctcgcgttcctcaagacgtgtgcgcacgtcgggatcggtgccggggaaggtgatgtcatcgatggccgctctggcgtacaagccggagccgccgacgagaatcggccggatgccacgtgattgcaggtcggcgatggtctcgcgcgcaagctgctggaatcgggccacgctcatcgtgtcttcggggtcgatgatgtcgatgagatggtgcggcacggccgcctgttcctcggcggtgggtttggcggtgccgatatccatgccacggtacatctggtaggcgtccgcgttcacgatttcggcccgctcccccgcttcggccagacgccgggcgatggcgatgcccaaccccgtcttgccggacgcggtgggaccgacgatggagacgactcgttgcgtcatatacgccccctcagtgccgcacggaataggtctggccggcggccacgtcggggtcggcaagcagattatggcggccggcgtgtgtgacggtggccgtgacgaaatcgccgatttcaggtaccggttcgccttcaggcacgccgatgtgcaccagcacgccggttttctcgcggccggtgacacggtgggtgtcggtgtccttcttgccgagtttgccggtgatcatcacttcgacgtcgcggccctcgaatgtggcgaggttctcttcggtgatctgctcctgcaacgccaccagacggtcgaaccggtcctgcaccacgtcgcgcggaatctgttccattgcggcggccggcgtgccggggcgtggcgagtagatgaacgtgaacgccgaggagaagcgcgcctggcgcaccacgtccatggtctgctggaagtcctcttcggtttcgccggggaagccgacgatgatgtcggtggagatctgcgcgtcgggcatggcggcgcggatgcggcccagtatgtcgaggaacttggcggagcggtaggagcggcgcatcgcgcgcaggatgcggtcggagccggactgcagcgggaagtgcagctggtgcatgatgttcggcgtttcggccatcgcggcgatgacgtcgtcggtgaaggcggccgggtgcggcgaggtgaagcgcacgcgttcgagaccgtcgatggtgccgcaggcgcgcaacagcttgctgaaagcgtatcgatcgccaataccataaccgaacgaattcacgttctggccgagaagcgtaacctccttggcaccatcggccacacattggcgaatctcatcaagaatgtcaccggggcggcggtccttttccttgcctcgcgtggtgggcacaatacagaacgtgcaggtgttattgcagcccacggaaatcgccacccacgagctgatgcgggaggcgcgggcggcgggaagctggctcgggaactgccgcaattgttcagtgacctggacctgcgccttgccggtcgcacgattctgatccaacagcttgggcagatcttcgatgttcttggtaccgaacaccgcggaaacccatggcgcagtatccgcgatcttcttgcggtcaagctgggccatgcagccgccaacggcgatctgcaggttcggccgaaccagtttgacgcgattgaatcggccaatggtgccatacatgcgttcggctgcgttctcgcgtaccgcacaggtattgagcaccagcaaatcgaggtcattgtcattgatctggtcctcggttgcaggcacgtagccattggcctccagcacgccggcgatgcgctcggaatcgtgcacgttcatctggcagccgagcgtatggatatggaacacgcccttgccgcgtttccccagcaaaccatcggttccatcggctgcaatcgaggcgcgctccgcctcggtcatcatgtcttcattcataacgaccgattctatcgacggggttcgtcatgctccggtcacgtatgccattggttgtcacgatgtcaaattatgggttcttggaaagattccccgcgaacgtccagattggctggaatccgccgagtatattggtggacgtgatacttgaccgacatagccgactcaaaacctccgatctgcaagcccgtctcaaagcgttggatcttccgggaggcaccttcactcccgaacaggtcgttgaattcgttgacctcatgcaggtgtatgaaggcgcgatgtacgagatcagcaccaaactggagattctcgacgacgagttccaggtgcggttcagccatgacccgatacatcatatggaacgccgtctgaagtcggtgagctcgatcatcggcaaactggagcgcaagggtctgccgatcggcgtcaattcgattaaggacaatctgttcgatgtggccggcatccgcgtgatctgtaattaccgcgacgacgtgtattccgtgtccaactatctgtcgtcgcagtccgatattcaggtgctgcgcgtcaaggattacatcaagaacccgaaacagaacgggtatcgttcattgcacgtaatctacgcggtgcccgtgttcctctcctcgggcgcgcattacacgccggtggaggtgcagttccgcaccatcgccatggattattgggcgtcgctggagcatgcgctgcgctacaagaccgatttgccggacaacaagctcgccgagcattcccagacgctgctcgactgcgcgcgctcattgcagaacatcgaggtacagatgcagaacatccaccgcgacatcaacggcgcgccgcaagtgggcgaagcgcctaagacctcggactgaggtgctatggaatcggcctgtggccgattcattcaccgttgcggccacttcggcagcctggccggcgcttgggccagtagggtgccgaggaagatgagggcgcagccgaggtagccgcgcggggtcatcacttcaccgagaagcaacgcaccgcctaccgccgagaagaacgattcgaggctcatcagcaggctggctcgcgtcggtggcacccattgctggccgaccacctgcaaggtgtacgcgatgcccaccgagccgatgccggcgtacagaatcggaatccaggaatgagcagcgccggcccagtcgaccgagccttcgatcagcgaacccgcccagctcagcacggcggtggtgcagaactggccgaatgaaagcttgatggcgtccacggtgccgcccaaagtatcgatcaccagaatatgcacggcgaacagcacggccgtgaacacgagcaggatatccgccaggccgatcgaaccgaaaccatcggtgatgcacagcagatagaagccggcgatggacagcgccacggccacgaacaccagcatgccgatgcgccggcgcaggaacacgaaggccagcaacggcaccatcacgatgtacatggcggtcaggaatcccgcacggccggccgatttgccgtacagaatgccatactgctgcagggtgctggcggtgaacagcacgatgccgcagatcacggaaatgaccaccgggttggcgagcaatcgcgccacggccgaatcgggcttgttcgcattcagcttggcaccggtgatggtaacgacgtcggatgcaccgttcgatgcggcatctgtggagacggccacggatgcctcggtcccaacgacatcggccccggctgtatcgcccttatccgcgctcccccggccacgcatccacagcagaatcggcaccaaagacagtgctcccagcgtgaagcgcgcggcgttgaagaacatcggcgacatcgaatccatgccctggacctgcgccacgaacgcaaaaccccagatcagcgcggtcaacaacaggctcagcatgcctacgagttcttgtcttttcacggggagccagcctaacgtgcgaatgtgacagacatgaaaaagcccggccacaatgtggtcgggctgtgacgtttgacgggcaggctacatgccgctcaccaatcggctggcgaggctagtccctgttgccgagcagctgcaggatgtacaggaacatgttcacgaagtcgaggtacaggttcagggcgcacaggatggagatcttcttgaccatttccgggccctgggcctcgtattcggtcagcagcgcgcgcgtggactgcgcgtcgtagatggtcatgccggcgaacaggatcaggccgatggcgcagacgatcttggtcatgccgtcgacctgcacgaaggcgagcacgatctgcgagatgatgagcacgatcaggccgatcatcaggatcgggccggccttgagcatgttgaacttggtagtcatgccgaacatggtcagcgcgaagaagaacgcggcggtgacaccgagtgccacgccgatcgagccgaggtcgtagaccatgaagatcgagctcaaggtgaagcccatcaatgcggcgtacacatagaacatgacgcgcgcggtggccgacttcatcttggtgacgcgcatgccgagcaccacggccagagcaatctgcgccacgcacaggccgatgaggcccaccatgccggtggccatgaggaagctgtagtaggctccggtgatctggccgagcacggcgaccacggcggtgacgaggatgccgatggtcatctcgccgtacaccttggtcactgagactcggcgggcctcctcgtagttgtaggtcatcgtcgtgttgatggtggccgcacccgcaccggcaccagtaccctgcggcacgtattggtaggtgggagcgccctgcggctgggcatagtagttctggccgtaaccggactgtgcgtattgctggccatatccagactgttgggcggcgttgtaatcaggcgtgttgtattgcgggttgtattgcccgttgttctggggctgctgaccgaatgtcataatcgctcctttagcgtttgttccagtaccaatcttagaggaacaaagctgaacattccatgaatatgatcgatcggctcgttctgctcatctcaaagcgtaacgggcgttcccaccatgcgcgtggcatgcacttgagattcgattgacattcgatcgcagcttggaccgccgcgcgattcactgcaacgtgaaggtatgcgtcaccttggtgtcttgatccgttgataggaacgcagtgacatccaccgtaatcggcgaatcgtcttgcagcacatagcccagcgtcaccgttgccgtggccccgggctgcatctgggccaaatacgaattcgcatcatagccttcaggctgatcgaagtatattgccgtctccagttcggtgccgttctggaacacgttcgggtgagccaaagtggcgaacgagttgttcttggacgtgttgttcgtccattcataagtcaccaaagcggtgggcttaccgtcatagtcgttgacgcttttcacggcggagactattttcacgtgggcaccttcgatatcaccttccaaatcctgctcgccctgcgctttctgctcggatgccttgctcttggaggcatcagacgatttgcccgcggactttgatgatgaggattgtgacgtgtcgatgcccttggactccttgatggaatcgtcaatggccttgctggcagcggactgcatggccagcgtgatcacaatggccaacaccgacagcaccgccgccacaatggacagcaccttgccgcgtttcttgccccggaaggtgcccactatggcgataatcgccagtatgacgccgatgaagccaaggattgcggcgatattgttgacgatgggaataaaactcagcaccaaacccaacgcgccaaacaccacggccgcgatgccgcagatggtggtatgcagatgttgcggttgcggcggctgaggctgaggctgttgtggctggtactgctgtggggatgagggaaccggctgcggggcgatgttgtggttggacatgatgtgctccttctcgtatcttccccgaaatagggatgtgagcacgacgctaccggccgcgaaacagcgacgttagtggacgaacggtcattgttcgttgcctgttcgggcaatacggaggtgataacggtgcccgcatgtccagtggcgggggccggatgcaggtcatacagtggaaggcatgacgaacccacaacgcgccgccgggccataccccggtttccgacccggctcacggcctgacgctcgccctatgcccggcacggggtccccggttcctacaccggatacggacgaggtgcccgtgactacgcgcgtatggtgttcggtcgttatggtgccattggccagtttcatgtgcatggcgcaaacctcgttcttcgcccagaattttgcgcaggattccgcaggatacacgctgatggtcctctgcaccttgctggcattcccggcagggttcctgctcttggcccgcagcgaatacccggaggcgacgttctggatcgcctgcgcgctggtggtcgtgttcccgtatgactcgctcatcgcactgatggcgatgacctcattgctcgcccgtcgttcaaaccggaatacgaccatccgcgccacggttggcggcaccatcgtgacgctcatctcccagcttcgtgacgccctgcaacagcccaaagcctcgatttggcatctgattttcgctcaaccgcataccggcggcgattcaggctccccgatggtgatgctggtggaggagccgaccgtcatcatcaccaccacggtggcctcactggcgttcgtgaccatcgccacgctcatcggcctgcatatccgttcgcgcgcccgcctgcgcacggcgaacgcaatggccagtgcggccaccacgcatgccgcgaccctgcagaccgacctgaccaaccagcagctcgccgacgccatcgccgccgaagcgcacgacaccctcgcgcattccctgtccctgatggccctgaacgccagcgcgctcaaggcggaggcggccaagctcggcgactcccccgaagcgcaatcgttggcggacaaggccgaggacatccgtcggcagtcggccggggcattggacgaggcccactcgatcatcgacatgctgcgcaacccacgccaggcatgggagcagctcgccccgtccggcgacacatcgctgacccgcgaatcgttggacgcgctgattgcggacacgcgcaactcgggcacgtcgctcaacacctggatcgatatccagcagctgagcgtgctggatgagtcaatcggcaaggtggcctaccgcgcgatccaggagggattgacgaacgcgcggcggcacgcgcccggagcgccggtgtcgttggaggtctccgccacgccgcaggcgggcgtacatatccatatcagcaatccgatcgccacggatgcgaccgagacgcagcgggcccatggggccggactgcctggtttggcagcgcgcgtgcactcggtcaacgggcaatgccggtatgggatggacgatcggcacctgttccatgtcgacgtgcaactgccttggcgcagctaagatggctagcgtgagtgagaagaacgggaatagtgtgtctggtggaaagcccgaacgcggcggtctgaccggaagcggcaccggcttagagcccaagccgatccgggtcagcgtcatcgatgacgatccgatgatctgccaggcgatgagcctgatcctcaacgattattctcacgggcgcatcgaagtcgtctccacgtccaccgatggcgagacctgcgtgaggcgggctgccgaggaaaagccggatgtggtgctgatggacatcgccatgcccggcgtggacggcatcgaggcgacccgtctgctgcgctcgctctcccccgcgccgcacgtgctgatcctgacctcgttgagtccgtccggcaccgtggaacgcgcggtggaggcgggcgccgaggggttcgtgtcgaaaaccgatgcggcggacgatatcatccgccgcatcatcggggtatgcgagggcgcgccgcagttcaacacggccagtcagaaacagctgatcgacgatctgagcgtcacgcggccgcgttcgcgccgcgatgaggcgcgcgccctgctcgacgcgctgcccgaccgcgagcgcgaggccgtgatgctggcggccgagggctatacgaacgccgaaatcgcctcccgcatgttcatttcggagcgtacggcgaaggcgcatctttcttccgcggcgaacaagctcgacatgggccgcgtgcagatggcgcggctggtggagcgggccgatctgccggcgcggctgtaagtcgtccggttgttgagccgtatcagtcataatgggaatatgagtgaagcgattattcgaacattacgtagggatgactatccggcgctgatcgacctggtgcgccgcacctggtatgccgaattcgatgagcggaccggtctgctggcggccgaagcggactgggagaactgtctggcgcgcaccaccaacgcgttcgtcgccgaactggacggccagccggtcgccctgatcgtggggcgcgtcgatgcgctggaccatcggagcccgctcaactcgcatcggatcaactcgtggaacgcgctggcgcggctcgtgttcgcgaagggcggaatcaaggccgccggcgagattctgggcattctcggcatcgacaaacggctgcgcgcccaggccgcgagcgccgggcatgactatgcggcggaagtggtgctgttcgtacttgacccggcggcgcgcggccacgggctgggccggcgcatgttcgagacgctgatggacgcgttccgcctggccggcgtgcgcgactacttcctgttcacggacaccacatgcgatgtcgggttctatgtgcatcgcggcctgacgcaggtgtgcgagcagtcactgcccgcatccgtgccgggagaaaacccgtcttcgttctacttgtatgaggggtcggtgcccgagccggcgtgatgtgcccgccgtcgggcaaacactggtaggcttgagcacaagttggtatgccggcataccgtccacaggccggcgacgaaggggctgacatggcaatcagtgcgaaggaactaccactcgggaaagtgttcaccccggatttccggttcacgatcccctcattccagcgggcctacatctggaagaccgagaacatcctgcaactggtaagcgacttggatgacgcctgcaagtcgcccggtactccgtacttcctcggctcgctaattctggtgcgcgagggcgataaccgttacgacgtaatcgacgggcagcagcggctggtatccctgtcgatcatcatcgccgtgttgcgcgatctggagcgagacccggacctcatgcgccaactcgacgcgctgctggtggagcccggcgacaagctgcgcggcatcgtcaccgagcctcgcctcacgttgcgcgagcgcgacgcggcgttcttccgcgaacacgtgcaggaggacaacctcgaatccgtgttcgatatgaacgacgatgatctagcgaccgctgcgcaacgcaatatcgtcgccaacatccgcaagacgtacgacgagatctccaattggtcggcatccgaacgccagcaattcgcgcagtatctggtcaacgaggtgacgctcgtcatcgtgaccaccgacgatctcgacggcgcgcatcgcatcttcgacgtgatgaacatgcgcggcctgccgctcaccccgtcagacgtgttcaaggcgcgcgccacggccagcctgtcgaccgccgaacttgacgtgtacgccgcccgctgggatgacatcattgacccgcttggcgacgatccgcatgactgtgaggaattcttcgcctatctgcatctcgtgctcacgcacaagccggccaccgacaagctcatcgaggatttcctggccgacgtgctgcaaccgtacatcgacaaaggcacggtgcccacgttcatcaaccaggtgctggcaccctacgcgatggcgtggcggattatcgcgcgccccagcgataccgtactgcccgccgaggtgcgtagccggcttgagggattggacgattaccgcagccacgagtggaagcccgtggccatgtgggcgttggtcaattcgtatcgcgggctgggcgacgccgatttgtcgccgttcgtggttcgtgcctcgcgtatcgccagaaccacggccacgttggaatcgttgggcgcccatgacgagcgtcggctgctggaaattctgaccgcattggaacaggtgaccggcatccgcacgctgaatcgcgctggaacgttggagcggcgcggttatgcgaacgccgccatccgtgatcttgacaagggctatttggtccagcgcgtgaacgggttgcatgtctcggacggcgaccgtgaaggcgcattggtccgtttgcatggcgagatgcagggtgacggcgatttggtccgtctgctgctgattcgcgccaacgagcagaaggccggcatgcagttggatcgaccacgccggttcagtgcgctgccgattatgccgttggatatcgaacggtcgaaatcgtttgcggactggccgcaggatcagcatgatttctggatgtaccgactcggcaatatggcgctggtgcagggccctgaggatcagttggacaggttgagtgaatatccggcacgtcgcgaccgcatgctgttgcgcgcggattcacgtcgtttcccgctgaccaatcagttgaaggatttcgctgactgcacacctgccctgctggaggcgcggcaggaagagtcggtccgactcatcgtggaatactggggcatccggtatgacaaggacgcccgtgatctgaccaagcagaatgtcgatgagttgtcgaagacttctccacggccgtctcatagttcgcggcgcgtcacgatccggcaggtgattgacgctggtctgctggtgccgggcgagcgtctggtgtgggatcggccgcgcaagggcgagcgctggtttgccacggtcaccgaaaacggtcgtctccgtctggatgacggctccgaatatccgactccgaccgccgcggcccgtgccgccgccggaggacgtcgcggcggcggtctggacgtgtggaagcgcacgcgcaacggtcagaagctcagcgacatctggaagcagttccgtctacaggcgcagtaggctacggtggccggcacatcattggtggctcccctccgtgagggaagccaaccgctcatttattccagtgccgccacgatttcagccggtgttttgcaatattcgggaaaatgactgattagttcggcatccgatgtgaccacacagttggcaccggattgttgcgcggcaacgatgatcagatcatcttcaaaatcccgatgccgtttttgcagggaaaaagccttatcacatgtcgactcatcgacagcgacgatgtcacacatctccttcacctgctcgatacaacgccatggcacccgtgacgacagaaagccgcgagtgaaattctccacttccgattcattcggtttgaattccctacgaatcgccgatgatgataggtatgcgatatccttcagcgacaatgacgcgcacaacaacgtaatgttgttcttcgcgccaagttccataaccgcttccgccatcttggcgtgatcatcgcgatggagcaaatagtccaacagtacgttggtatcgagcaaaatacgctgcatggaaacgtcggtcatcaatcggccctcttcatgttgtaatacgcatcaagttgctcgtcgtacattttgtcgcggaactgcttgtaggtaaggccttccatgaggtcggtgtcttctgagatcagtccggccttgaccagttccttgtgtacgtatccggcaccttctcgaatcagtttcagcttgcgctgcttttcctcctcgcgggcttgctcttcggcggtcgtttccaatgccggcacttccttgcggtcggcgatgtacaaccacagcgaccggattacgtcactcaccgatacgcctttgccattgaggacttcttcgacctcgttcttcagtttcgcatcaatgcgaacgttcatttggaccatggtcatggcaacctccatttcgaagatgctatacagtatagcattttggcatgcgtggaaaaggccggtatccgttggcggataccggccttgctctcctcagtcagcttcgctgacagctcccctcaagagaggggagccaagaaggtggttacttcatgaggttgcgcagcacgtactggaggatgccgccgttacggtagtagtcggcctcaccgggcgtgtcgatgcggaccaccgcgtcgaactcggtcttggagccgtcctcgtgggtggcggtgacgtggaccgtcttgggggtcacgccctcgttaagcttctcgacgccggcgatatcgtaggtctcggtgccgttgaggcccagggactcataggattcgcctgccgggaactgcagcggcagcacgcccatgccgatcaggttggagcggtggatgcgctcgaagctttcggtgatcacggccttgacgccgagcatcaccgtgcccttggcggcccagtcgcgcgaggagccggtgccgtattccttgccggcgagcaccacgagcggcaccttgttgtcgatgtagtcgcgggaggcttcgaagatcgtggtcggcttcttggcgaggaagtcgtaggtgaagccgccaggcgtcacctcctcgcccacggaggcgagcagctggttgcgcagacggatgttgccgaacgtgccgcgcaccatgatctcgtggttgcctcggcgagaaccgtaagagttgaagttcttcggctccacgccgcgctcggtcagatacttgccggccgggctggaggccttgaacgcgcctgccggggagatgtggtcggtggtgaccgagtcgcccaggagggccagcacacgggcgccgtggatatcggcgaccgggtccggcgtggccttcatgccgtcgaagaaggtttgcttgcgcacataggtggacttgtcgttccacgcgaacagctcgccttccggcacgtcgaggcccttccagcggtggtcgccgtcgaacacggaggcgtagtccttgaggaacatctcgcggctcacgctgccgtcgaccacggcggcgacctcggcattggtgggccagatgtccttcaagtacacgtcgttgccgtccgcgtcggtgccgagcggctgggtctcgaagtcgaagtccatcgtgccggcgagcgcgtaggcgatgaccagcggcggggaggccaggtagttcatcttgacgtccgggctgatgcggccttcgaagttgcggttgccggaaagcacggcggtgacggtcaggtcgttggcgttgatcgcctcggaaatctcgggcagcagcgggccggagttgccgatgcaggtggcgcagccgaagccgacgagctggtagccgagtgcatcgaggtcgtcctgcagccccgcggccttgaggtagtcggccacgacctgcgagccgggagccagcgaggtcttgacccagggcttgggcttaaggcccttggcatgtgcgttgcgggcgatcaggccggcggcgatcatcacggacgggttggaggtgttggtgcatgaggtgatcgaggcgatggccacgtcgccgttttcgatgtcgaaatcgccacggaagtcggtggacacggccaccggatccttgacggtcttctcggtctcgtaggcgggggcggtcttctcgaacatgctcttggcttcggacagcagaatgcggtcctgcgggcgcttcgggccagcgatggacggcaccacggtaccgaggtcgagttcctcgtattcggagtactgcggttccacgtaatccgggtcggaagcgtcgccccacagcttgttggccttggcgtaggcttcgaccaacgcgacctgctcttcggagcggccggtcaggcgcaggtagtcgagcgtgacattgtcaatcgggaagatgccgcaggtggagccgaactcggggcccatgttgccgatggtggcgcggttggccagcggcacggaggcgatgccttcgccgtagaattccacgaacttaccgaccacgccgtgcttgcggagcatgtcggtgatggtcaggaccacatcggtggcggtaacgccctccgggatggagccggtgagcttgaagccgaccacgcgcggcacgagcatggagatcggctggccgagcatggcggcctcggcttcaatgccgccgacgccccagccgagcacgcccagaccgttttcggtggtggtgtgcgagtcggtgcccacgcaggagtcgaggtaggcgagcgcgttgccgttggcctcggccttgctcatgaccaccttggccaagtattcgatgttgacctggtggataatgccggttcccggcggcaccacgcggaagttcttgaatgcctgctgaccccagcgcaggaactggtagcgttcgccgttgcgctggtactcgatgtccatgttttgctggaccgcgtcggcgatgccgtacttgtcgatctgcacggagtggtcgatgaccatgtcggactggacctgcgggttgatgacctccgggtcgccgccgaggtccttgaccgcgtcacgcatggtggcgaggtccacgatgcagggcacgccggtgaagtcctgcatgatcacgcgggacggcgtgaactggatttcgtggctgggttcggcgttcggatcccagtcgagcagggtcttgacgtgctcgtcggtgatgttggcaccgtcgatgttgcgcaccagattctcgaccagtaccttcagcgagtacggcagatgatcgatgccgtcgagattggcgatgttgtagtaatcgaagtccttgccggctgccttgagggtagccagctggtcgtcgcgtaaggacatgcttcctccgaaatcatgaatcggcttatgatgccgctgattatccgctacacatggtacgggcacgttaccgaggctctggcgtgtcggcttgaagtatgagacaatcgcgccgccgtctcaatgccgacgcgagagcttgcccgtcagtccgcgcacgagcggcgccagccacaggcacagcgcgaagatcagcgcggaaccggccaacgcgatcagcgtggccaccatcgtggcgccggtcggcagaatcagggcgaagaagttcgccacgaacgggacgaacgcgccgattacgcccgccgccgcgaacaccgccaccagcacgccacgccaaccgttgagtggtctggccacgcgggccagcacgaacacgcccatcgcgaacaggatgatggcgctggtggcgcgcagggcggacaggtccgcggcatcgccggtcacgttccagcccatgaccggcggcagcacccaagcggccagcagcaccgacagcgcggtggcgatgccgcccggcagcgcgaacgtgaccacgcgcttgaggaatcccggaatatagcggcgcgtgttcggcgcgagcgccagaatgaacgcgggcatgccgatggtgagagcgccgatatacgtgatatggcgcggcaggtatgggtatgggatttgcgtcagcactacgccgagcgagatcagcgcggagtacacggttttgacgaggaacaggctggccacgcgctccatattggccatgacctgacggccccgcgccacgacgtccggcaggtgcgagaacttcgaatccaccagcaccacctgggccacggccttggtggcgggcgccgcattgcccatggcgatgccgaggtccgcctccttgatggcgagcgcgtcgttgacgccgtcgccggtcatggcaaccacgtggttctgcgtgtgcaacgcctgcacgatggccttcttctggtcaggcagcacgcggccgagcacatcgacgttttcgagcacgcgggccagttcgttcacgtcctcgggcagttcgcgcgcgtccatcgccaccggctcatggtcgcctgtcagtttcactctgcgggcgatggcacccacggtcactggattgtcaccggaaatcacacgacagcgcacaccctgctcacggaaccaagcgagcgtccgctcggcgtcctcgcgaatcttctcagagcacaacaccaacgccaccggctcagcctgcacatccagttgccggccgtccgagacattggctccctcaactgctcccctcagtcgcttttggcgacagctcccctcggagaggggagctgtagaccgcgcaaccagcaacacacggttgccgtcattggcatactcgttaacctgctgcaacaccgacgaatagtcaccctcaagcgcagaaataatcacctccggcgctcccatgtaccaggtctcgccggatttacgcaccgcactccatttgcgcgccgaagagaacgggacacgagactcaaccgcacctgccccatatccttgggccttgagcccggcgagtacggcttggccggtgccgttgggctgctcttcgttgcagcagtcgtagagggcctgcgtggctgcctgttccgcagccgcattggcggaatcgagcatcacgagccggttgaaggcgataccgccatcggtgatcgtgccggttttatcgaggttcagcgcgtccacgcgagccagtgtctccacggattcaagctcctgcaccagcgtattgtgacgggcgagacgcatggcggccaccgcgaagttcagcgaagtcagcagcaccaagccttcgggaatcatgcctactacgccggcgaccgcggaaaccacggcttgccgccattcgccggtggagagtgccgtgccccaaccgccgaccgtatgaatctgcgaaagaatcagcagaatgcacagcggtaccacgaggaaggtcatgaatttcagaatcgtgttgatgcccttgttcaggtcggacacggttttcttgtataccttggcctgcgcggtgagcgtggcggcgtaggaatggctgccgaccgcattgaccttgaccaatgccatgccggagaccgcggtggcgccggaatacacctgctcccccaccttgtggcgcacggtacgcgattcgccggtgagcatggactcgtcaacctccagtccccaggtctggatgatctgcccgtcggccggcacctgttcgccggcacggatccacagcaggtcgtcgagcacgatctcgttgtggggcacctccacgtccctgccgtcacgatgcacgaggaattcggaggccacaaggatggaaagcctgtccagcgtgcgcttggccctgagttcggtgacgatgccgatgcccgtgttgatgatgatgacgaaaccgaacaccgcgtccctccaggaaccggtgatcagcaccagtaccatcgcggcgaagatgatgccgttgaacagcgtgaatacgttggctcgcacgatatcttgaaccgaacgcgaggtggatgttttcaccgcattcgattggccactttcgatacgctgcaccacttctttgggggtaagaccggtcgctccgatctcaggcatttccacggctgttgttgcactcatattctccagcctaccgcgtcttgtttcgcaatccgctaaggctcagggatgattcagggtgctttctcagcttcaagggcctgattcggctcaggaaacggtgactttgatctcgcgttcgtggggttcgtcgcgcgtgatggtgagcacggcgtcagtaatagtcattggcttggtatcggcagtgtcgccagaatcggcactgttggtgttgaggtgaaggatgacggcgtacagcagttcatcttcgggcgcatgctttggatcaatgagagcgactggaataccggcttcacgcgcattggtcaacgtctggttccagctctcccggttggcgtcggtaacgtcgatgccgctgataaccacgattttgaccgcgcgagctacgaaatcggcaacaccctgctgtgcggtgaccgcattcttgtcgacgccagtatgagcatccatactatcggcaccgttttcgctggtagtgccggcgtcagaagattcggtttcaccggatacaccatcagttgcgtttgccgagcttgcggatgtttcgagcgaggcatagtagacattgagtttgtcatcagacagcgcattgatgacgaactcgtctgcggcggtgtcagtcgaccccacaaagccgactgtgacatccgtgggatgtgtggaatcgtgggcgacttccggcatgctgtcttgggtatcgccgaccgccctaccggccggcgtgcaggcggccagggacaacacagccgccatgcaggccagcaatccgagaattcgtcgtgtcatatgctcacctgtcagcgggtaaacagggccaccgtctcaacatggtgggtcatcgggtagatatcgaaggcacggatgtctttgagctcgtagccttcgccgatgagtgtcgcggtgtcgcgtgcgaggctggtgggatcacaggcgatgtagaccacgctggatgcgccggccgcggcaatctggcggcagaccttggcacgagcaccggcacgcggcggatcaagcactacgacattcggcttggccagatgcgccggcacatggtccagcgtgcgcgagacgtcacccgcgcgggcgtccacgtcgttcaggttcatggcgcgcagattgcgctgggcgttcttgacggccacacgcgcgccttcaacgctgagcatgcgggtgcgttcaccggtcattgtggccagcggcagggtgaacaggccggaaccggaatacaaatcccagattacggcgtccgccgctgactgcagctgcccgttgaccaggttgatcacgtgcgtaccgagggcgatcggcgcttggcgatgcacttgccagaaaccgttggcgtcaacctgatagtcgaaggtcgtgccgttgatggtcacctgttcggtgagcagctgggagccggcgcgcagttcgccgtccacaagtacggcgtaattgtcgtctgctgccgcggtatcgacgatctcgccgcgcggttcgggcacggaaagacgaatctgggagccgggttcaaagccgccctcccacacgtgttcgcgcttggcgacgtccagcaacgtgcgcgtggcaagcggcatggtgtcgatggccacgcggttgtgtgtgccgcgccggcgcatggatggcatgccgttgtcgtcggcaatcatttcgatgcgggtacgccaattgaggccgccggctgccttgtcgccgggcatgcgctcgatgggaacggccacgtcgatatggccgagtcggctcatctgttcggagacggtgatggccttccacttgagctggccgggcaaagagacgtgcacgagatccgcgccgcccactcccccgcccatcgccaagggaccggcaagtggccatgccggggtgattcggtcttcggacggctcgagaacctcgacgacttcgccggtccagaaccggtcgtcccggtcgtggggctcgtcaagttcgactcgcacgagttcgtcgggcaaggcgaagcggacgaacaccacacgaccgtcgatatgggccacgcagcggccttggtcggcgtatcgttcgatacgaacttcagcttgcatcatcgtcctttccggttgcgctcggttcgagttcggcatcaacagcgacttcagtctgtatcttcttagccgcgaccttatgccggtgcatcggcgtggcaataatgaggtaactcacccaaatcgccaatgcccagaacggaatgcccatgagcaggcgggtcacgccgagtgcagctacatggttggtcagatacagcggcacctgcaccaccagccgcagcaggaacagaccgacccacaggccggtgacaatcatataggcgcgtttcagggccttgtcgtccatccagtcatggaaccatgccttgaaatgctcggtgggcaggctacggatgaattcgacgaccaaacccagtccgggcacgcgcgcaatcagcgacacggcaagcaacgcggcatagccggcattggtaatgaatccgaagatgtagtaattgcgggcctcatgagtctgccatgcccaaatcaggcagatgcctaccgccaccagaccagagaccgcgcccattaccgactggcgctgaatcagtcgcacaataacctgcaataccgccagcacggccgaaaccgcaatggtgagattcagattgctcgtggccacgaacagtacgacgaacaccacgccgggcagcatggattcgatgacgccacgcgggccaccgatggcgtcgatgacggagaaatcctcgccttcattgccggcgtcggctagagcggacaggccggtgcgtttgttgtctgccaagtctcttcctataaatcagcgaacttcggagaacatcgggccgcgagacagcgtggtcttcacttcggtctgctggtcctggctcagcggacccttcggcttgttgtccggaatgtccttgaagtgttccttgccgttctcctcgccggcttcggccgcggccttggcggccttacgctcagcgggggcgaccggcggatgcatcgggatcagatcgcgcggcgccaaaggctcctcgccacgctcgacgacgatgtcggcgaagaacttgttcagcgcctcggtctccgggctgtccggatcgatagcagccttgccggagaagatgccacgcagcatccagcgcgggccgtccacaccaacgatgcgcgtgttcacggttttgccgcccttgacattgaccggcagcttcagttcggtgccgaacacaccgtccacttcagaagcggccttgttggcttcaagcaggtcaccgcgaacgtcatcccacagtcccagggtcttgggtgcggcaaaggcttcgatctccaggctggaggagccgaaggtgatggtggagccaagcacttgctggatggcgcggttggccttgatgcgcagctggatgccctggaggaagggcaggtagtaggcgccgagatccagataatcgtcataatcgggcacgtcctcatcgttgacgtcccacgggcctcgctcttctccgcggccctggtattcgctggatggttccgccaatacggtttcagcgctttccgcctttgctgcggcgtttgcggcctcggcggccaccttgtcctcatcgacaggctcaacggccggctcggcttccttcttgctcttcttcttgccgaatccgaacagtcccataattcctcgtttcatgtaacggttgcaaccttgctaacactagcactcaggcttagagaaagctgagcatcgcggccgccgatgtccggttcgattcgtagggaggccaaaatagtatggccgcatgaccatcaccattaccacgtctaacgtcaacggcattcgtgcggccaagcgcaagggcatcgaggattgggccggcaagcatgcgccggatgtctggtgcatacaggaggttcgcgcgcctcaggacgatgtcgattctattttcgatgaatttggtttcgaatacgccaccgccggcaagatcgaggcaccggccaacctccatgccatgaacgaggtctgccgggtgaaaggccgcgcgggagtcggactgctcaccgacttggaagtgcttgacaagcgatatgggctgccaggtctgagcgaggatgtggattcagggcgttggatcgaaaccgatgtcaaaacgcctgagggctacgcgatcaccgtggcatccgtatatgtgcatgctggcaacaccgattatccgaccaaaatggaacagaagtaccgttttctggacacgatgctgaagcgcatgggcgcgttgcgggacgaggctgcgcatggcggcaaacaggccgtgctctgcggcgatttcaacatcgcgcacacgccgcttgatatcaagaacgccaaggccaatgagaagcacgccggatttctgcccgaagaacgtgcctacgtggacaaatggctggacgaatacgagttcgtggatgtgatgcgttcgttggccggcgacattcaggggccatacacctggtggagccagcgagggcgcgctttcgacaacaatgtcggctggagaatcgactaccagttcgccacgcccgagttggcggagaccgcacgcggattcgtcatcgacaaggctcccacgtatgacaaacgctggtccgatcacgccccactcacgatcacatacgaggtatgacgtattccgtgggacaacatccgaaaatcgacgattttcgcgggccgtcccacaccccacagcatgagtaattatcgaccacactaagaatggcgtaattccggacttcgtgagaaatctgctgtgggacaacattcatgtccatcgattgatgttgatgttgtcccacaatttgtgggacaacatcgggaaaacaccaatttttgcctttcgtcccacgcgaaccatcatgcaaacctgcgcatacgaatattgggttctttccacggatggaaagaacccaatacaatgcgctcaaacgcagattatcagtccagaccgagttggagcttgccgccggggatggcgtcgagcaggtctcgggtgtactgcttctgcgggtggtcgaagacctcgtcggtggtggcatgctccacgagcttgccgtgctgcatcaccacaacctcgtcggcgatctgacgaaccacggccagatcgtgggtgatgaacaggtagctcaggcccttttcggcctgcagatcgttgagcaggcgcaacacctggtcctgcaccagcacgtccaaagcggacacggcctcatcgcacacgatgacgtccgggtccagagccatggctcgtgcgatggcgatgcgctggcgctggccaccagagagctcgttcgggtaacggcccatcacggaagccggcatctcgaccatgtccagcagttccttgacacggttggcacgccacttcttgtcgccgatcttgtggatgcgcagcggctcctcaatggaacggaagatggagtacatcgggtcgagcgaaccgtaggggttctggaacaccggctgcacgtggcggcggaagcccagaaggtccttggacttgaacgtggaggtgtcgcgaccttcatagaacactttgccggaggtgggcttcaggaggtgaagcaccatgttcgccacggtggacttgccggaaccggattcgcccacaatggccagggtggtgccacgcttgacggagaaggacacgtcatcgacggccttgaacatctccttcttgcggggcagcttgaattccttggtcaggtggtcgacggtgatgatgtgctcgctcttttcgagcgtgctttcgccggcgatgtggtgatcgagcagagcgtccgcatcctcaccacgctccttggcggagatgatgcgctgggaggccagcgacggggcagcggccaccagtcgcttggtgtacgggtgctgcgggtgctggagcacttcaagggatgggccggattcgacgacctgacccttgtacatcacgacaatgtgctgggcgcgctcagcggcaaggcccagatcgtgggtgatgaacagcacggcggtgcccaacgagtcggtgagcatgtgcaggtggtcgaggatgcgcttctgcacggtcacgtcgagggcggaggtcggctcgtcggcgatcagcagatcggggcggcaggccaagccgatggcgatgagcgcgcgctggcgcataccaccggagaactcgtgcgggaactgacgggcacgggtagcggcgtcgggcagaccggcctcggacagcagacccgcgatacggtcatccattgtggagccggtgacgtacttcttagccagataccaggcctggtcgtcggccacgccggccttgatgaggtcgtcggccacgcgccaacgggtttcggagcccggaacccattcgttggtgaagcgggcgacggccttgtcgaaggcctcgccggacacgccggcttcagtcaaagccttcttggcctcggtcatgagctcgggcagttccttggcgccgaggaaggtctcgtcgtcgttgcccttgacttcgacctcgtcgccggccagagccttggcaagggcggagcgcttttcgtgagccacgtccatgttgttggccttcagtgcttccttgacctgggtgccgatacgccacaccgggttgaggttgctcatcgggtcctgaggcacgagacccatcttggtgccgcgcagcttgtcgaactcgctctgcttggcgccggcgatttcctcgccgtcgagcttgatggagccgttgaccacgtgaccggtgccgggcagcagacccagcacggccatggcggaggtggacttgccggaaccggactcgcccacgatggccacccactggccagggtagacggtgaagttggcatcgcgcaccgcgtgcaccggcttgccggtgtcagtggtgaagtcgatggccagatccttgacctcgagcagcggaccatgctctttctgcatagccagcatcttggcgttggtgttgtcagtcataatgtttctccactcccctcgctcaggccgtacggctcttcggatcgagggcgtccttgacggcgtcgcccatcatgatgaacgcaagcacggtgatggccagtgcggcggacgggtagaacagcaccagcggatcagtctgcaggttggtctgtgcgctggagatatcgccgccccagctcaccgtggtggtcggcaggccgacgccaaggaagcttagggttgcttcggccacgatgtaggaggccagcgaagtggtggcgatgacgatgatcggggccagggagttcggcaggatgtggcggaacagattcctggcaggcgtggagccgagggccgtggaggcggtgttgaattcgaggttcttcgatttcagcacggcgcttcgggcgatacggcatacgccgacccagccgaagagcgtcaacaccagcacgatcttccaaatggacttggaggtcttgaacatctggagcaccacgatggcgccgagcagcataggcagggcgaagaagatgtcggtgatacggctcagcaccgcgtcaatccagccgccgaagaagccggcgacggcaccgatcagggtaccgacgatcacgaccagcagcgtggagagcacgccgacagacagtgaggtacgggtgccgtagaccacgcgggtgtacacgtcgcagccttgcaggtcgaagccgaaggggtgaccggcggtggaggggctcagggagttgcccagatcgcaagcgttcgggtcttgcttggtgaacaggcccggtgcgatggccacgacgatgatgaagatgatcagcagaccagaaatgatgaacagcgggttgcggcgcagggttcgccatgcgtcggcccacatgctggtggccggtgcggattcatcgacggaatcgacgtcctgcagctgggtctcctcgaggggggctacatagcggtcttgaccgggcagggtttccatgaagtattcggttcccggctcgccggtctggttgagctcgttttcagtggtttcgtttgccatgtgactcactcctccctatcacgcgtaacggatacgcggatcgagggccgcgtacagcatgtcgacaacgaggttgcacactacgaagatcagcatgagcaacgtgacgatggacaccaccaggtttgcctcgcccttcagaatggactggtaggtgaggaagccgatgccgtggatgttgaagatctgctcggtgatcatggcaccacccatcagggcgccgatgtcctgaccgaggtaggtgacgaccggaatcagggagttacgcaacacgtggcgcagcatgacctgaccgttcgacatacctttggcacgtgcggtgcgcacgtaatcctcggcgatgttggaggagatttcggagcgagtcaatcgaatgatgtaggccatcgacaccgatccgagcaccatggccggcatgagcaggtcgatgaagcccgggtctgcgcctgccgtcaccggcaatatcgcccactgaataccaaagacatattgcatgacgaagccggtgacgaaggtcggcacggaaatgagcagcagggagacgatcaggatgacggtgtcgtaccacttgcccttcttgaggcccgagatgatgccgaagaccacgccgaagatcgcctcgaacacgaacgccatcaggccgagccggatggtgaccgggaaggcgcgggcgatttcgtcgagaacaggctgcccggcgaaggtatcgccgaagttcagggtcagtgcattcttcaggtagataaagtactgaacgatgaacggctggtcgagatggtattctgcgcggatctgggctgcgacggcctcattgacgggcttgtctccgaacatggccttgacggggtcgcccggcagggcgaagacaagggcatagaccagaagtgtcgtaccgagaaccacggggatcatctgcaggatgcgtcgcagaagatacttacccatacggttgctccttatttcctagaccggccagaaagggcatagtacgcccccgccggtcgataaatactccgacattctaccgcatgcccggactgtgatatgtaaatttgcgctaacgcaaggtttgagagtaagcaatgccggtggatatgtccatggttgcggtcggatagtggatactttaacttggttcccgctggcgggagcaagcacccctcacacaacaaaaagggcggggatcttgcgatcctcgccctttatttccgaactacctaacggtatccgttcagtgagtcagactcacttcttggacatctcggcgtaggtcgggaggttctgccaatcgaaggcgtagccggacttcacgttgagggaagccacaccggaggcgttggagtagtacagcgggatggccggaaggtcgttgaggaggatctcctcagcctgctggtacagcttgttggcgtcatcagtgctggaagcggcagcggcctgcttgcacaggtcatcgaaggccgggctcttgtagtcaccatcgttggagccgttgccatcagcagcagcggtggagtacagctgccacaggtagttctcggcggacgggtagtcaggctgccagccggtacggaaggcgcccttcatctgacggttggtgacggcgtcacggaattcctggaaggtcgggatcgggttggtggccgcgtcgatgcccaggttcttcttgagctggttcacgacagcatcgtaaatcggcttggcaccaccatcggcgttgtaggagaaggtgagctggccgtcgtacttggagatggcgtcagccttggcccacagttccttggccttggaggcgttgaacttcaggttgtcggcacccttgagggagtcagagtagcccggggtcttcggggaggtgaactcggtggcggcggtggcgttgccgttgagcaccttgtcgatgagctggtcacggttgatggccatggagatggcctgacgacgcagctggccttcctcgtcgttcttgaagtggtcaagggaggacgggatggtgaaggtctggataacggagccggcctcggagtaagcctggaccttcttgtcagtcttgaaggtcttggtgaaggcggccgggacggaatccatcacgtcgaggttgccgccctgaatgtcgcggtaggcggcggagtcgtcggtgtagaccttgaaggtcacaccgtcgttcttgggctgctcgttacccttgtagtcagggttcttgacgagggcgatttccttgttgtggtcccagtggtccagcttgtacgggccattggagacaggcttctcgccgaaggccttcggatccttgtagaaggactcaggcagcggggcaaaggccaggtagccgaccttgatcgggaacacggagtcggactggttcaggtcaacggtgaaggtggtgtcgtccacgaccttgaggccggagagctgctcgtcacccttcagaccatcagcctggagctcatcgtagcccttgatggtggagaagaaggaggagcacttctgggcgttcttgacgttggccacgtaggaccaggccttggtgaaggactcggcggtcaccggggtgccgtcggtgaacttccagccggacttgatcttgatggtgtactgggtggcgtcatcgttcggggtgatggactcggccacttcgttggaagccttgccatccttgtcgaaggagaccagacgggagaacagcaggtcacccggcttgccgccaccggtctcgttggtgttgcccgggatcagcgggttctgcggttcggagttgtacgcagtgatgatgttggagccagcggtgtcaccggaggcagcgttactgttggagccgccgcaggcgctcagcagcatggccacggagcaagccatggcagcgaaagcaagagctttcttcttcatatgatttctcctattcattaggttgcgaagcgtttcagcctcgcctcatgcgaacggggtcggatttcctcatcgtcgggacacttacgcttcccgccgcttcggacacccaaccccgttgctgttacctgtcatttttgcgcacttgggagacaagcagcgtatttttgttacacccatgtaaaattcgggggcttttaccggctaggttcagtctttgctaagtttgttaaccaatgcccacatagtggtcatgcccggggaaaggcctgtccgtaacggttcttgagctgctcgatggagacgtgcgtatagcgttgtgtagttttcaaggaggaatgcccgagcatctcctgcacctccctcagatcggcaccgccgtccagcatgtgcgtggccgccgaatggcgcaacgcatgggggctgatgtccggtacgccggcctctcgggccgctctgtgtacgatgtcacgggctatgcgttggtcgatacggccgcctcgtgcgccgaggaacagggcgttggtagcacgggacttggctgcatccgttgccgtacgggccagtacaggccgcccttgttcaagccaagtctccagcgcacgctgggcgggcagtccgaacggcaccacgcgttgcttgttgcctttgccggtgactttgatggtgcgattggagaagtcgacgtcaacgatatccatcgacaccagttcggcgacacggatgccggtggcatacagtagttcgagaatcgcggcgttgcgctgcgattcggcgacgactcgggcgctgtcgcgcttgtctgcacgggcgggtgcctcgttgcggtttacggtgtcggctgacttatcagctgtcttgccgactgccttgccgctgccactgccggacgcggctgccgctcccccatcgcccttgtactggtttgttgcaacggcctgttcggcgacatccaataactgctcagcttgagattcggtgagcaccgcgggcagcgtgctgggaatcgagggagtcatcagtgtggcggccgggtcggtgttggtcaccccatgctcataggcccacgcgaagaacccgcgcacggccacggttttgcgggccatgctgctgcgggcgtgatcgcgcgattccaccgccatccagctacgcagatcatccagcgtgatctcgttcagatcggtcacgccgcgcagctcgaacaggtgcagacatgccgtgagatccgcgcgatacgctttgagcgtattcgctgacaggccgcggttggacttcagataggagacgaaggagtcgatatcgccgtcgaactgcgtagatgacactctcgttctcctccgaattctttatggccttgggttacggccggggtggcgtgttgcgccgctccggcacgggtttcaatgtggcaatctgttcctgatggatggtcacgttctgggccgggcgcgaaccattggcggcggcgtcacgcaccatctccaacgtgtatccgtcccaggaaaccacgtgacccacatagtcgcggaacttcatacggtggtcgaccgggtcaatgccgtcggtgatgcgcaccaccacgcgggcaccggccggaatctgccttggtaacgtcatacgtcatcatcccccttaaccattcgccgcatcaacttcgatgcgtttcccggaaaacggtacagactaccttactcctttgagcctttcgaacagcggagccacacggtcttctcacgaaaacaagcgggaacttcatccccctcgcgcggccttcttcgtgacaggcggcgaggggaacctgcgcacgggcctacatggcggtacgcagttacatggcggggcgcagttggatgatggcctgacgtggatggacgaagccggtgatggcttctcctcggcgtgcggagaacagcagggtctgctgccagccggcttcggggacggcgagctcgcgttccgggaatccggcggcagttgtgccggcttgcggcgcagcggtggccgtaccgtcttgtgcagcggtgatgccggcatgtgtcacggcggccttgtaccggcggaaggggtcgccttcggcgaagaatcccatcacatcctgctcgccggcggcaccagcgtgcagttggtcggccatatcggtcagacgtgccgccatgcggcgcagcagcgcttcgacgttcagcgagtcttcctcgaccatcgcgcgcgtgcggtccgggtcggtcagggacacgcgggtcatgtccctccagcagccggcggccagcgcggcggcgatgttgcggtccgggttggcgaccagttcgttgatcagcgcggtggacaccacatgcggcatgtgggagatcatcgctgcggccttgtcatgcgtttcgtcgtccacgacgatgacgcggttgccgacgtccttggtgatcatcgcggcgacgtcgaggaagcggcggtagtccgtggactcgtccacggtgatggcccatagggcaccgtcgtacagatgcgggtcggcggcctgccagccggacagttcgttgccggccatcggatgggcgccgacgtagcacttccccagcccggcagccttgacctgatcgcggaccatgcccttgaccgagcccacgtcggtgagcgtggtgttcggatggtcgcccatgagcggggccagggcggcgaggattgcgggcatcgccttgagcggattgcacagcacgaccacatccggctcggcatccatgagttcggagagcgtgctcttgcagaaaatgccatcggcttcggcctgggcgtaggggtgcgggcgatggttccacgcgacgacgcgcacgccgcgctcggtcaggcggcgtgcgagcgagccgccgatcaatccgagtccgacgattccgactgtatctaccacagcagttccttccttgcttcctcggtgtactgccagccttccggcgcgcgattggtgatgtggacgccgccctcgggcagcatccaggcgtcgaccggcgggttcgggcgttcgcggcgtgggtagacggccagggtttttgcccagtcgccgtgtccggcgatctcttccagtgcggtgcggaatctcggctcccagggggcggcgtcaagggtggcgatgaagctgtaggttccgtcgtggcctttgatcgggcgcgagatgaagctggtcatgttcagtcccgcatcgcgcaggacgtccagcaggtcggcgagtacgccggggccggtgaccagcgggatgaaggtgatgatggtttcgaagtcgccggcgtcattgctgtgggcgcgggcgttgagttcctggaccacatcacgcggggcgatgacaaggaattcggtgtgcgcgccatcgaaatcctgcacatgttcggcgagggtgtcgagatcgtagagttcgccgcagatgctggggccgagcgccacgcggccgggcttcaggtcgcggcaggcggcggcgttggaggatgcgggttcgggctgcaaatggtgttcggcgatgaaccgggtgcattgggccagaccgtgcgggtgggcgctgacggggttgccggtgcagtcgtagatgctgtggccgcgcacggtgaaggcgttgaaggccacgtccacactgatccgggcgaagccggccgcgttgggggcgtcgatcagcgcgtcgagattcgggaccacatagccttcgacgttgttttcccatgcgatgacgccccagccttggcgcgactgtacggcctgcatgatcgcgggcacgtcgggcagagcgatgaggtcgaagtcgccgagtgtggcgaactggtcggcggccgtcattgccgcctgatgggtgaaggtgccctccgggcccaagtaaaacagtttcatgcgtgccataaagttctatggtagcggccgtaatcccctacgcccgccgatacgcgacgcattcccgggaatgtatcgccatatatagttacgcgcgcgattcagaatgagtgggaatgacgaaccagcgggcgggaagaatgagcaggacgacttggaccagtatcaggccgtacagccagatgtagccggcatgttgggagaagaacggcatgtcgccttggaatccggcgacgatgagcgctttgccggatgtggtggtcagcgccataccccatgcggtcagtgaggaggcgatgaggtgcagggccagtccgaccgcgcccatgcgcgaacgggcgcaccatgtcgataggccgatcagcagaaacgccagcaccagaccatacggaatattcagttccgcacccatacggtgggcgaacgtgcccacaaaggcggaagccacgcccgccgcaatcgtgatcaacgatttgaccagcgcgttctggcgatacgaccacagacgcaattcagtagtgctcttcacagtcatgcgtttcagtataggtggggatatgacttggtgaggaataaacttagctcccctcagagaggggagctagagagaatggtcggctacagccgcaccaaatcacttaccctgctgggcggcgttctggcggcgctgcttggcgcgccacttgtaccagtcctcacggccgaggatgatcttgcgcacgcggatggactccggggtgacttccacgcactcgtcctcgttggcgaagtccagggactcctcaaggctcatcttgatcggcggggtcagggtttcgagcacgtcagcggtggaggaacgcatgttggtcatgtgcttggccagcgtgatgttcacgtccagctcgtcgggcttgttgttcacacccacgacctggccttcatacaccggggactgcggttcgacgaagaagttgccacgggcctgcagacgctgcatggcgtacggggtggcgatacccttgcgatcggaaaccatggaaccgttctggcgaatggtgatggcgccagcccacggcgcgtagccggcagagatggaggaggagatgccggtgccacgagtggcggaaagcagcgcggtgcggaagccgatcagaccacgggacggcacggtgaactgcagacggacccagccggagccgtggttggtcatgccatccatacggcccttacggtcggccatgagctgggtgacggtacccatgtactcttccggcacgtcgatggtggtgttttccatcggctcgttgatcacgccgtcgatcttcttggtgaccacctgcggacggccgacggtcagctcgtagccttcgcggcgcatctgctcggcaagcacggccagcgccagctcgccacggccctggacttcccaagcgtcgggacggtcggtgggcagcaccttgatggacacgttaccgatgagctcgcggtccagacggtccttgatcatgcgggcggtgagcttgtggtccttgccctcggtgccggccagcggggagtcgttggtgccgaaggtcatggagatggccggatcgtccacatggatgagcggcagcggcttcgggtcgttggggtcgacgatggtctcgccgatcatgatgtcgttaacgccggcaacggccacgatgtcgccggggcctgcggattcgaccgggatacgctcgaggccctgggtgcgcagcagttcggagacgcggaagttctcgagggagccgtccacacgggacaggccgtaggtcttgcccttctcaagggtgccgttgtagatacggaccagaccgagtcggccgaggaagtcggaggagtcgatgttggccacgtgagcctgcagcggggcgccctcctcgtattcgggggccgggatggtggagatgatggtttcgaacagcggctcgaggttgtcgttgtccggcaggccaccgtcggcgggctggttcacggaggcgtagccggccttggcggcgcagtagatgaccggcatttcaagcagctggtcaaggtccaggtcgatgccctcgtgctgcacgtcgtcggccaggccgagcagcaggtcggaggtttcgccgacgacctcttcgatacgggcgtcggggcggtcgaccttgttcacgcacaggatgaccggcagcttggcttcgagggccttgcgcagcacgaagcgggtctgcggcagcgggccttcggaggcgtccacgagcagcacgacgccgtcaaccatggagatgccgcgctcgacctcgccgccgaaatcggcgtggccgggggtgtcgatgatgttgagggtgatgccctccgggtggccgtacttggcggccagcggaccggtgtattccacggccgtgttcttggcgaggatggtgatgcccttctcgcgttccagatcgttggaatccattacacgatccggcacttcctcacgctcgctaaacacgtgggactgctgaagcatggcattgaccagggtggtcttgccgtgatcgacgtgagccacaatcgccacattacggatatctccacgaaccgccatcgaaacctctcttaatactgattttcttgcgtaatcgttcggtacttgcgttctcgagtacttaagtacttactctgaggtgtttattcatacctacacacaaaccgtcacgatgatactcgcacaccttgactatgtcggaacatagaaaagcacctcacaacggcagaactcccgcgtctcgacgaacccctcgcgggatttctgccgtttttacggccttcaaacggcagaacccccgcgtccctttcgccgggacgcgggggttctgccggtaatcaggcaaatatctgttctcccgtcatcgacttccgtcagtcttcgagatcgaggcctttgcgttcgggcaggcagagggcggcgacgcaggcgatgatgaaggcggcggcgaagatgatgaaggccacggccttgttgccgccggacagggtcaggaaccacggcatgaggagcggcgcgatgatggcggcgatgcggcccaccgctgcggcggcaccggcggccgcgccacgcaggcgggtcgggtagatttccggggtcacggcgtacaacacgccccacgcaccgaggttggaggcggacagcagcatgccgaacacgagcacgagggccgctgatccggcctgcgagaacgcgaaggcggccacggcggagacggccaggaagatgctcagcgtcttgcggcggccccagacctccaccagccaggcggccaggaagtaaccgggcagctgggcgaaggagatggcgagcgtgtagctgaatgacttggtcagggagccgaactggtcggcgagcagcgacggcatccatgtgaacgcgccgtagtaggagaagttcacgaagaaccacgtggcccagatggcgatggtgcgggccaggtacttggagccgaacagctcgcgcgtcttgatcttcggcagcggcttgcccttgggagaggttaccggggccactcccccggcttcctcgaagtagcgcacggccttttcggcttcgtcttcgcgacccttggcttcaaggaatcgcacggattctgggatgtgtacacgggtgacaatcgcgtagagcagtggcagcgcgccgatggccagcgcccagcgccagccccagtcaccggtgttcgggatcacgaagtagccgattatggcggcgatgatccagccgacggcccagaacgattccagcagcacggtcatgcggccgcgctgtttggtcggcgaaaactcggagaccagcgtggaggcgaccggtagttccgcgcccaagcccagtccgatgatcagtcgggcgccgagcagcatgccgagcgaccaggacagcgccatggcgccgttggcgatgccgaagatgatcagcgtggcggtgaacacggttttgcggcccacgcggtcggcgatgaagccgcccaccgccgcgccgatggccatgccgacgaagccgatggacagcacccacgacttttcggtcggggtgaggttgaagtgcgggtcggctgcgatggcggcgaccacgaaggaaacgaggccgacgtccatggcgtcgaatgcccagccgatgccggaggcgacgaggagtttacggtgcgccttgttgaagggcagccggtcgaggcgctcgttgcgggtgagctgcgcgggttgcgctggagtggtggtgctcacgtcgtttcctttctggtaagtggcgtcagatttagtgtcgggtcaggtcggtgtaggactcttcgatggccaagctgatgcgttcgacttgttcgcgggtcagcggcttgcggaaggtcatgcgtaatgccgatttggcgatggacggttcgaggcccatcgccagcaacgtggcaggaatctcgtggcgcccgatggcgcaggccgagccggatgaggcagcgatgccacgcgcgtccaggtcgacgagcagcgcctcgccggtgacgccgggaaagacgaaggaggcgtgaccgggcagacggcgcacggggtcgccggtcaggtcggcgcggggcacgacccggcgaaccgcatcgatgagcatgtctcgggacgcgaccaattcacggtactgcgcctgcatgcgcgcattcgattcattgagtccgatggcgagcgccacggcaccggccacgttctgtgtgccggagcgcaggccgcgttcctgcccgccgccggacagcaccggttcgatgggcgtgcggccgcgtaccagcagtgcgcccagacctttgggcgtgccgaatttgtgtccggatacggacagagcgtccacatcccagtcacgaaaacgaatcggaatctggccggcggcctgtacggcgtccacatggatgggcacgccgtgcgcatgggcgatgcggaccagttcctccacgggttccacggtgccgacctcgttgttggcaagtatggtggagaccatcgtggtacgttcgctggcctcgccgtcgagctcgcgttcaagtgcgtcgagatcgagatgcgcctgcgcatccacgggaatgcgcacgacttcgaaaccgaaccattcgtgcagccatgccgccgattgggccacggccgggtgctcgatagcggaaatgataatgcgcgggcggctgcttgccagctgtttgccatcggtttcgtcgagtccgtagaccggccgcaggcccagcttgcgcatgcgggccatggcaatgcctttgatggccagattgtccgattcggtgccgcctgaggtgaagatcacgtcatccggccgggcgcccaatgccgcggcaaatgatgcgcgagccgcgtccagcgcgcgggccgcggttttgccaggctggtgcacactggccggattggcgtaggcctcagtcaggaacggggtcatggcctcgatgactgccgggctcactggttcggtggcggcggcgtccaggtacagttcgccggcttcgctggacgtgttgggggtatcggccatgactagttccaatccaatccgaggtcgatgctacgcacggagtgggtgagcgcacccacggagatcacgtccacgccggtggcggccacggctggcactcgctccaggctcatgttgccgctggcttccacgatggccttgccgtcgatgagctccacgccgcgacgggtgtcgtcgagcgagaaattgtccagcatgatggtgtccgctccgccggcgagcacggcgggaatctggtcaaggcggtcgacttccacttcgatatgcgtggtgtggcccacctgttcgcgcacgtggcggatcgcgccggccaggtcgatgccgcgcgcggcgagcgccgccagatggttgtccttcatcatgaccgcgtcggacagtccgtagcgatggttgtggccaccgccacagaccacggcgtatttctcgaacgggcgcaggccgggcgtggttttgcgcgtatcgacgatgcgggtgcgctcgtagcggcgtggccgggtgacgggtccgtcatagtcatcgccgtagatggcgttcaccgcgtccacgaaggcggcggtcatggtggcgatgccgctcatgcgctgggtgaagttgagggcgatgcgctcggcggtgagcaggtcgcgtaccggaccttccacggtgacgagtacctggccacgctggaatcgtttgccgtccttgatggcggcggtgacggtgacggccgggttctgcgcggcgaaggctgcggcgaacacgtcgatgccgctcatcacaccgttttcgcgtgcggtgaggtgggccgagccggtttcgtccgcggggatggtggtctcgcaggtgatgtcgccgtagggcgcgtcttcggcgagcgccgcttcgacggcgacgcggatgatgtgtgatgtgagcatgggttagtccttgatgtaggcgacggagtgggcccagttgtcgactggctcgctgtagtcggtgcgggcgtgggcgcctctcgactcggtgcgggcgagcgcggcgatggcggccacatagcctacggtgagcatgttgcggttctccaaagcctcaacgctgcttgcagcaccatcggcgtttacatcagcctgggcgtttgcggcggcgaggccttggccgagttcggcgatggcggttttcagtccggcctcgtcgcgcagcacgccgacgccatgccacatggtgttctggatgcgggtacggtcccagaccttgtcggcggcggtatcgtcagcagcagccgtagtggcaggagcggccagcgcgatcggcgcatggtcgaacacggcaccggtggcggagttcaggaacggttcgggtgcccagaccgcgtcgtcaccgtccgcgacggcggcaagaccggcgcggcgtccgtagacaagtccttcgagcagcgagttggaggcaaggcggttggagcccatgacaccggtacgagcacattcgccggccgcgtacaggccggggatggaggtccgggcgtccagatcggtgcgaatgcctcccatgtagtagtgcgcggcgggcgccaccgggatcggctccttgctccagtcgaagccaagcgaacgcgtataggcgtcgatggtcgggaatcggtgggccaggaagctggctaggtcggggttctcgcgggtcatcggcgagacgtcgagcatcacgggcttgcctccttgcgcctgcatcacgcggaagttctcgcgggccacgacgtcgcgcggtgcgagttcggcgcgcggatcgatgtccttcatataccggtggccgtgttcgtccagcagcaccgcgccttcgccgcgcacggcttcggagacgaggaagtgctcgcccacggccatggcggtgggatggaactggtagaactccagatcggcgacctgggcgcccgcacgccatgcggcggcgaggccgtccgcagtggagaccggcggattggtggtgtacgggtacatacgacccgcgccaccggtggccaagatcacccggccggcggccagatccttgtcctgcccgtcgatcagcaggtggacgccggcgatgtggccgtcccgcacgatgagatctttgaggaaggcgttctcgatgatgtggatgcgcgggctcttgcgcaccatggcggagacgtccagttcaagcactttgccggtggcatctcccccggcatgcaccacgcgggcgcgcgaatgagccgcttccaggccgcgcagcatgtgtccctgcgcgtcgcggtcgaagtggacgccggccgcggcgaactcgcggacgcgctccgcaccctcacgggtgaggatgtccacggccttcgggtcgcacaggccatggcccgcggccatggtgtcggcggcgtgcagcttcgggtcgtcgtcggagaaaatggccgcggcgatgccgccctgcgcatgataggtgtttgattccaccagttcggccttggttaccaaggtcacgtcgtgtccggtaccggccacggccagtgccgcggacagtccggcgacgcctgcgcccacgacgacgatttcagtgttgctcattgtgttgctttcctctgtttttgcgtcatctgctcccctcagtccgctacgcggacagctcccctcatgtacgaggggcgtcagggatggatcacgggtgaacgcgcagcatgcgctccagtgccaccttggcttcgcgggcggtgtcttcgtccacggtgatgcgattgaccacgttgccggcttcgaggttctccaaagcccaagccaggtaggccgggtggatgcggtacatcgtggagcacgggcagaccacggggtccaagcagaacacggtcttgtccgggtactgcgcggccagacggttcaccaaattgatttcggtgcccaccgcaatggcggatccggcgggcgcgttggcgatctccttgacgatgtacgcggtggagccagtaccgtcggcggcatcgaccacctgcatcgagcactcggggtgcacgatcaccttgacgcccgggtatgccttgcgggcacgttcgacctgttcgacggtgaaacgctggtgcacggagcagaagcccttccacagaatcatcttggcgcgggcgtaatcggccggatcggcggcgccgccctgtgccttgaacggatcccacagcggcatctcgctcagcggaatgcccatcgcgcgggcggtattgcggcccagatgctggtccgggaagaacagcacgcgcttgccgcgggcgaacgcccattccagcacggcgtgcgcattggaagaggtgcatacgatgccgccgttgcgtccgcagaacgccttcagcgcggcggatgagttcatgtaggtgaccggaatgatctgctgcaagccatcggagtccggctgggtgccgcagatctcgccgagctggtcccagcattcctggacctggtcgatgttggccatatcggccatcgagcagccggcggacaggttgggcagggtcacgctctgttcgggcgtggagaggatgtcggcggtttcggccatgaagtgcacgccgcagaacacgatgtggtcggcgtccgggcgttcggtggcgttcttggccagctggaaggagtcgcccacgaaatcggcgtgcttgatgatctcgtcacgctggtagaagtggcccagaatcaacagtttggagccgagacgctgcttggcgtcggagatgcgctgctgcagttcctcgtcggaggccttgcggtattcgtccggcaacacctgctggcgcggcgcgttggcgggcagacggtcgagcatcgaggcaccgggaccgtagctgggtgtggtggtgtcgaagtgccatgggtcctgggtcagtcctgcatcgcaggtgctttgcgcgcccagcttggcgatgatctcgtcaacggacggcgcagtgaatagtgcggtcatagtggttcctttcctatatacgtctgtgataccggcccgaagcgggtcggcgggaaaaatcagatgcgcgcggatgggatcagcgcgtcgagagcgtcttcacgctcgccttgtctggacagttccacgatgtcgtcaccatcggattcgtggggcgtaccgttctcgacaggtcgtttggggatgtagcggtagacggtggccggtcgttggcggccttcgcgcatcttctccccggtgtcttcaaggtcgcccgaggcaagcattttgcggcggaagttcgccaagtcgaggggttcgccgccaatcgcctcatagacgccgtgcagttggcgcagggtgaacgtggggccgagcagtcgggtggccacgtcggagtattcgattttggagcgcaggcggagcagcgcgtagtcgatgatctggcgatggtcgaacgccagctcgggcagttcgtcttcggggaaccatcgtacgttgtcaccgtcctcgaagcccgcggcctcggtctggccgacgagcgcccagtacacgacggataccatgggcaatccgccatgggatcgggtcgggcctccaaaggtgtacagctgttcgaggtatcgcgggtgcaggtctgtggtcgattcgagggccgcgtaggcagactgttccaacgaccggtcggagcgcaggtcaccgccgggcaacgcccagcagcccaggaacggctgacggacgcgcttgaccaggggcaaccagagacgggaatgggccgagttcgcggcattgccggaatcggcggcactgttgccggtatcgccttccgggccgagtgccagaatcaccactgacacgccgacctgtggcggtgcgctgcggcgctcggacacattgccgaatcccatgccatgcctctttccataccggttgttctccctgcattgagagcatagcactacttatagtcacaatgaccataaatcacatattggatggtccagcgcacgaatattggccaggtagcgggccccaatcgctacgaaatcacgtccgtatcttccgatttcgactgtgtcatttcggcgacggacgggaggaacggcgctagggagggtagttcgtcgagactcttcaggcccatttggtcgaggaagaattcggaggtaaccaagagggccgcgcgggattcggggtccacgccgtcttccttgataaggccgcgtaccgtgagcgagcgaatcacgccatcggagttgacaccgcggatcgcggccacttgggctcgggtgacgggttggcgataggccacgatggcaagcgcctccagtgcggcctgactgagtctcgcagtctggccgtcagtgacgaatgatgagacgaccggctcgaacgcggcgcgactggcgaactgccagccgcgagcggtgcggcgcagttcgaagccgcgcgggcggatgccacgggattcatcgccctcatagtcatcgtgcagggctcgcaatgcctcttcgactgtgttgcggtccaatgccaaaatacgggccagctcggtggcggtctgcggctggtcggcgaccatcagaatcgcttccagacaggcgggcagcccgccgggaaaatcgtctaccgtgaaatccacgtattcggggcgcgtctcctccattcccctcaccgcggcctttgcggattcagccgtcgattcggcatccgccatgtgttcggttgcattcgttgcgtcaatccgttcagtcaccaatcaccgtccttacgcaaaatcgccttcggaaatgttcacgtcgctcatcgtttcgtctacgccgggtacccacctcaggtgcagttcggcaaacggaccatcttgctgatactgcagcacaccttgtttgaagaacacgagcacggccatgaaccgagccaccacctcaatacgagaagtgcagtcccgggtcaattcgctgaacgacatcgactggtcgcccttggattccaatgccgcgatcagccggtcgcgcaccaccagcgattgggcccgcagatcgaccaacggtacgtgcagctgatggatcgacacttcggaggcgggcgcgttggcgatgacctgggcggccagttgggcgagttcgagcggagtcagcgtccataccagctcaggcagcatggcggcaacgccctcgtccatggccgccggatgtgggaatcggccggagttggcggcgatacgcgcccggaaatcaccggcggcctgcttgtaggcgcggtattggaggagccgggcgaacagcaaatcgcgttcgcgcagcgcttcaaagctttgctcgtcgtgctggctgtcttcgccgccgggcagaatcgccacgcttttggcctcgaccagaatagaggcgatatcgagaaaggcgctggcctcatccatgttttttgtgaaatcgagcccgcgcacgtatgtcaggaattcctcggtgatcgaggagagggaaacttcggtcagctcgagtttgttgttgacgatcatgcccagcaaggcatcaaacggaccggaatagacttcgaggttgacccggaagccggaagtggcggattcctccgtgctgatttcggcttccgcggagcttccctcagcctcgctacgcgagccagcttccctcagagaggggagccgagaaagggaagtctcattcatcgtttatcgaaacaatcgttacgccacgatgccgcgagcaatgagctcacgtgccacctcacggtattcctttgacgtcttgtgctcaggggcatagaccaccacgggcgcggcggcaaccgtggaatcgggcagtttgatggagcgggagatgaacgcgtggaacaccttttcgctgaacgcctcgtaaatgcgctggcagacctcttcgcagtgcagtgtcttggtgtacatggtgatgagcacgccgtccacttccaatgcgggattgatgcgggactgtactttttcgatggactgcatcagcagggccacaccgcgcaaggcgaagaattcggcggccacgggaatgatcacgccatcagctgcagcaagcgcgttcacggtgagcaggccgagcgatggctggcagtcgacgatgatgagatcgtattccgacttgagcttgcgcagcacgctgttcaggatctgctctcggcccacttcggtgaccagctggacctcggcggcggacaaatcgatgttcgccggaatcacatcgatgttctcgaatgcggtgtgctgcaccacatcatgtgggtccacggaaatatcgaacagcgcggtgtaaatcgtgttctccacggtattcgcattgacgcccagtcccacagtggcggcgccctgcggatcgaaatcgacgataagcacgcggcggccatactgggccaacgcaccggcgatattgatggagctggtggtcttacctacgccgcccttctggttgcacatggcaatgacacgcgccggaccgtgctgttgcagcggttcgggtgcggggaaggtttcgtattcacgtccaagcaaatcggtaggcatactgtctaccttatcaacatccgggttcgctgggggtgcaacgacatacgttcctgccataggcagcgttccttgacggaatgcgctgtctttatcgcgggtgtctcgccaatcgtccatcgttgccctcgccccctttgccgggaatacctgctcgcccatcctaatgtactcgccgcgctcgcctcggaacaccgttttgccgctggtattccagtgttccgaggtttatggatctcgtctcgtactatgtcgatgcgcttactcggtgcgcagtgcggtggccgggtcttgcttggctgccttgcgcgagggaatcaggccgccgatcagcgtgagcaccacgcttaggatcaccagcaccacgccaccggtcaccggcagggaggcattgacgtccgcattgccgatgaagtggtgtagcacggcgttgatcggaatattgagcagcacggtcaagcccacgcccaacaggccggagcataggccgatgatgccggtctccgcattgaacacctgggatacgttgtgcttcgaggcacccattgcgcgtaggatgccgatttccttggtgcgctccagtaccgaaatgtaggtgatgatgccgatcatgatcgaggagacgatcagcgagacggacacgaacgcgataagcacgtaggaaatcgcgttgacgatggtggtcaccgaactcatcatgagcccaacgtaatccgtgtaggtaatcttgtctttcttcgagacggtgttgttgtagtcggtaatcgcgtcggcgatgtggtccttgtcttcgaaactgtcggcgtagatgttgatcgagctgggcgcgtcacgactcaccacaccgaatgcggcgaggttgtcgtcgtaggtgccggtcgacacgtactggtcgtagatcgcgacaagcacgtcgttcgaagccgtggcgatatacgagtcgaaactgtcggcgagctgctgttcgctcatcgcggccatcgcggcggcctgatcgccggcacccgccgcaccagcggcacccgcagcaccagccgcaccagcaccagcggcgtccgatgagcccgtgccgtactgctgcccggcactcatcatcgacttggccatgttcgccttctgcgtcacgcccagcgaagccacgtaggtgcgcgcgtcggccgccttggtgacgtcgtccgagggcgagaacgtcatgccgttgagcacgttcgtgttcgggttggccttctgatcggtaacgatggcgctggaggccgcacggtcgatcaaatcattggtcagagcgcgcgtgtaccccacaccagcggccaacggtgtggccgaggcatccttcttcgccttgacgacgcccaccaccttgagtttggtggccgtttcgaggcgctgttcgatttcgtccttgtcgttgccgatgaaacggtagtggccgtcatcgtccttgacgtactggtcggatgccggaatcatgtacagcgtctgatcgagggccttagcatagtcgatcttgtcttgtggagtgctgaccttgtcgccggcgttgagcttggacatcatctcgtggtaatcggaggcgggcagcaggccgagctcgtacagcgtggtcagcggcacgctgttgttgtcgtcaagcaccagcaccacctcgtccttggacttcggccatgaaccgttgaccacctggtagttgtcggtgatgaccttgcctacgagcttgctgtcgtccgctcccggcatgatctcgttgaacgagtcgggcgcggcgttctcatcggttttgccagtcagcatcgacatctgctgcgaggtgatcgacgaggtgccggacatgccggacgagcttgtggacgccatctgcgaggccatcgaggcagagtcgctggatccgatcgtcacgccgtccgcattgaccagcgtgccgtcggggtcgtggtcgaacacggagaatttcacgtcatatgtgtactggatgccggtggaacccacatactggtgaatctcgctcttggaattatccaggtatttcttgaagcgggtcaggttgttttcggtaatcgaactggtcaggctggacgcctgcttgacgctgcggtcgtccgggtagatgccgtcggttttgtgcgtcttgccgccgtatccgtcatcgccgcccatctggccgcccatcatgctgctcaggtcgaaggtctgggagtcgacggtgatcgggtaggcggtcatcgtgtcacgctggatgtcactgatgtatgtgttcacgccagtcgacaccgatagaatcagcgcgatgccgatgatgccgatcgagccggcgaacgaggtcagcagggtgcgcgccttcttggttttcagattgttgaagctcaacgccagcgacgtggtgaacgacatcgacgcgcggcccatcgtcttgtgcacggccggctgttcggccgtctcgtccacgacgaacgggtcggagtcggagcggatcacgccgtcgcgcaggttgacgatgcgcgtggcatattgttccgcaagttcggggttgtgggtgaccatgaccacgaggcggtccttggccacgtccttgagcaggttcatgatctgcacggacgtgtccgaatcgagcgcgccggtcggctcgtcggccagaacgatgtccgggtcgttgaccagtgcgcgggcgatcgccacgcgctgcatctggccgccggacagctggtttggcttcttgttgatgtgttcgccgagtccgaccttctccagcgccttgcgcgcacgttcgcgacggtcggccttgccgatgccggaaatcgtcagcgcgagttcgacattcgacagaatcgtctggtgagggatcagattgtagctctggaacacgaagccgatggtgtggttgcggtacgaatcccaatcgcgatccttgtattggcgcgtcgagatgccgttgatcaccaaatcgccgtcgtcataccggtcgaggccgccgatgatgttgagcaaggtggtcttgccggaacccgaggggcccagaatcgcgacgaattcgctgtcgcgtaggttcaggctgactttgtcaagcgcctgctgaacgaaatcaccggttttatagcgcttcgagatcgatttgatctgcagcatgaatacctcttcctggctgacggttcgctgttatgtactgtattgtcacgccttgaatttccggccgactttggtgctcccccgccgcgattccgctatgggcggacgcgtcgcagaatggtgtgtctcaccgcgctctggggtgtgaggtcagatacgtttcgatcagggtttcagggcttacgtgcgtgtagatctgcgtggtggtcacgctggcgtgcccaagcagttcctgcacggtgcgcacgtccgcgccgccttggatcaggtgcgtggcaaaggaatggcgcaaggtgtgcggatggagtggtttggtgatgccggcccgctccccggttactttgacgatttcccataccgattgccgcgagatgcgcttgccgcgtttgttgagaaacagtgcgcgcctctcgggaatcttggcgctggagcgctgttccaactcgccacgccccgcattgaggtatgcggtgatggcccggcatgcgtaactgcccaatggcacaagccgctgcttggagcccttgcccatgagtcgcgcgatgtgctcgtccaggtcgatgtcgtccagattcgtaccagtggcttccgagacgcggcagccggtggcgtacatgaattcgagcagggccctgtcccgtaataccaccggatcggttgagccgccgactgccgccgcgtcgagcagacgggttacctcgtccacggtgagtacgtcgggcagggtgctggcgcctttgggcgccttgactgcggtcgaaacatccgccgtcaccgcgtgctgaccgagcgcgaaacggtggaattcgtggatcgaggccagtcttcgggctttggagcgggcggactcccccgcctggtcaagggcggcgatgtagtcttcgacgtcttgtttggttatggcgtccggttcgtggatgccgcgggtttcgagccaatcaatgtatttggcgatgtcggattcgtaggcggtgacggtggccgtggcgagccctcgctccacgccgatgtggacgaggaactgctcggtgagtctggtgaatccgttggtcatagtgcccatggtacaaagaaaccccgctcggaagcggggtttctagtgtgaagtcacgacttcaagcaatcaggcctcgaccggagcgttgacgtcctcaggcagggcggccttggcggcgtccacgatggtcttgaaggtgtccgggtcggagacggcgatctcagccagagcgcgacgatccagctcgatgccggcgagatgcaggccctgaatgaagcggttgtaggtgatgccctcagcgcggacggcagcgttgatgcgctggatccacagcttgcggaaatcgcccttgcgagccttgcggtcgcggaagttgtagttaaaggagtgcagcagctgttccttggccttgcggtacaggcgggagcgctggccacggtagccggaagccctctcgagaacaacgcgacgcttcttgtgggcgttcactgcgcgcttgacacgtgccataatctattcctcagctttctaaagtcttgttatttccgggtaagccctatgctcacttctgcagaagctggtgcagcttcttggcctggccgccgcgcagcacatcgtcggcggacagttcacggcgcttgcgagcggacttgtgctcgaggttgtggcgcatggcggaaccgacatgcttcaccttgccggtgccggtgatcttggcgcgcttggaagcggcggaattagttttcatcttcggcattgctgccctccttgctggtttgcttcttgtcggaagtcttctgagaaatcgcggactgcgcgtcggccgcggcctgagcctgagactcctgcttggccgcgagacgagccgcctggcgagcctgacgctcggcgcgggactcggcgccacgacgacgctgctcggactgggtgtgcaccttcttgcccttcggcgcaagggtcatgatgatgttgcggccctcctgcttcggcttggactcgacggtgccgtattcctcgacatcgtcggccagacgctgcagcagttccacgccaccaatcgggcgggagatctcacgaccgcgcaacatgatggtgaccttgaccttgtcgcctccgttaaggaagcgggtcacatggcccttcttcacgtcgaaatcgtggtcgtcaatcttcaggcggaaacgaatctccttgatttccgcggtgctctggttgcggcgagcttcacgagccttgatcttctcgttgtacttgaacttgccgtaatcaatgagcttggcgaccggaggcttcgcgttcggggccacctcgacgagatcgaggtttgcctccttggccaggttcagcgcgacggaagtcgcgatgacgcccacctgctcgcccttcgggccgatcaggcgtacctgcgggacgcgaatctcgtcgttaatacgtggttcgtcgctgatgatgactccaatcctctacttcaattccgtggcgagggcctttgctggagtcctgttcaatgctttgggttcatggcaagccaaagcccgcgccaatatgcgctcagcttctgcagacgcatatcagttctttgcgtcattcctgattgcgcgttgtatatcgcaatcgctaggctgtttgccttgaacccgaggccttgaaaggcttccaggtggggttgccccgctttcttgatttctcaagccaaatggaaagtctaccatacgcccggacattcgcggcccgtgtgtcgaatctactgcacggcgcgcagcagaccgccgaagccttcgtctttgagaatctgccgatatgggccggcctcatcggcgatgatttgatcgatggcatgcatgccgagtacttcgaccggtgccttgtcgtcggtgagaatggtcgacgctgagtccggttcgttcaccttccggaatcgagaggcgacctcttccatataccattcgagatcttcgctgccggtgcgctcgtaggtggtctcacgcaggttgagcgccttggaggcctgctgcatggagttctcttcggagccggaacccggcttcttggcgaacagttcacggttcgtggtgttcggcacgtcggccgtcagtgtgttcccattgccgaacacgctggcgatggtatcgctcaacgcctcgttgatcgaaccttggccgtccgagatcatgttcatgttcaccaccatcacgccgccggggttcaggtgctctctgaccatggtgaagaactcggtggagctcatctggaagggaatggtgatgtcctgatacgcatcgaccatgatcacgtcgtacttgtcatgcgaggcggcgagccaggctcggccgtcatacgtggtcacggggatgtcggcgggctcatcgaagtattcgccggccagatcggtgatcttctggtcaatctccacgccggtgatgttcattttcggataatactgcttcagctggcgggcgtaggtgccggtgcccatgccaaggatcagcgcggaattggcattgtcggcaagcgccggcgcagccagggccgtgtcgtagtacatacctgtcagtcctttgtctttcatcgtgacggactgcacgccgaacagcacgttggtggacaggatcgtgcggtcggagaggttcttgacctgtaggtagttgtagatggactcgccctcataggccaggttggtttcccagaacgcgaagccggtcaggggcgagacgcaggacgtggccacgaagatcacggcgctgaccacgcaggcgatgcgcttggccttgatcgagatgaagtagatcagcggacatgccggagaagaattcggtgatgtagaggaatatcttcgatttgagaatcggccgctcgcttgcctcggtgatctgtgccatcgctccgctcccctgcctgtgcgcccatcgactactgttctgatgcgtagcctatcagcattttcccggccgatgggtggataccggctacagtaggcatcatgactcaggtatgcgtgatttttggtgcgggcgaatactatgcgggcacgcccgtggtgccggccggtgcgtatgtgattgcggccgatggcgggctcgaccatacgcgccagttgggcatcgtacccgatgtggtggtgggcgacttcgattcgctggagggccggccaccccgcaccgatgtgcgcaccatcgcgctgcccgcgttgaaggacgatccggacatgctctccgcgctgaaggtcggctggtcggcgggttgccgcgaattccatgtctatggcggtttgggcggccgcatcgaccatacgatttccggcattcaactgatggcattattggcccggcacggggcaagcgggtatctgtatggtgacgggctcatcgtcacggccatcaccgatggtaggctttcgttccccgcgcatccggtgcccgaggacggccgcatggtgtcggcgttctcccactccgatgtttcgcttggcgtgaacgaaccagggctgaaatacgagcttacagacggcacgctgaccaatacggtggtgcagggggtcagcaacgagttccgcgacggcgtggacgcggccatcagcgtggagcacggcacactgatcgtcaccttccccatcgaggtggcgttgcctcaggtgagtcgattccacgaatttggcggcgatatcggcgagctggacaccgcagtgtccaagctgctggttcgctgacttgcatgccgcgcgcttgctcatgatgattcgagacattcctccaaaggagaggaaaaatcacatgtcggttgcgggcaatccgaattgtgagcgctcacagaaaatacggcatttttgtccaaaacgcacgctgaaacgttgccatgtgtacagagtcggcattacagtagcaactgttggtaaacaatggcccggtgtgccaaagcgcgccaaggccaccctacaagggagaattacatgacagttaagattggtatcaacggcttcggtcgcattggtcgtctcgccttccgtcgcatcttcgagctgcaggctcgcggcggccaggctggtgacattgaagttgccgccatcaacgatctgaccaccccggctaccctggcttacctgctgaagtacgacagcacccacggcaccttccgtcatgacgatggcactccggttgacgtcaaggccaccgaagactccatcatcgtcgacggcaaggaatacaaggtctacgccgagaaggacgccaacaacattccgtgggtcaagaacgacggtgttgagtacgtgctcgagtgcaccggcttctacacctccgccgagaagtcccaggctcacatcaacgctggcgccaagaaggtcctgatctccgccccggccaaggatgacaccaccccgaccgttgtgttcggcgtgaaccacgacatcctcaaggcttccgacgtgatcgtctccgccggttcctgcaccaccaactccatggccgccatggtcaagctgctggacgagaagttcggcatcaaggccggcttcatgaccaccatccacgcctacaccggcacccagatgctgctcgatggcccgcgtggcaccaagaccggccgcaacctgcgcgccgccgccatcaacaccatcgcccactccaccggcgctgccaaggccatcggcaaggtcgttccgtccgtgaacggcaagctgcagggccacgcccagcgcgtccaggttccggacggctccgtcaccgagctgaccaccgtgctgaacaccgagaccaccgccgacgagatcaacgccgccttcaaggccgccttctccgacaccgactactacggctacaacgatgagggcatcgtctcctccgacatcctcggcgacacccacggtggcgtgttcgacccgacccagaccgacgtcaacaccattgacggcgtgaccctggctcgcaccgtgtccttctacgacaacgagtacggcttcacctccaacatgatccgtaccctgctgtacttcgctgagatctccgagtgaaccactgcggtctaggccgctacggttcgtttgagaactaagctgtgagacccccgccttgtgcgggggtttcttcgtagtagaacggtaatcatggcaaagaaaagcaagcatgataagggcgcgggttccactccggcgacagtccaactggagaaggcgggcgtggaattccacgtatacgaatacgagcactccaacgaccatatggatgacggctacggcgtggaggcggccaccaagctcggcttcgacgagcatcaggtgttcaagacgttgatggcggacaccggtgccgaacgcgtggtgggcgtggtaccggtgagcggtcatatggatttgaaagccttggctgcagccgtaggtgccaagaaggcctctatggccgatcccaaggtggcgatgcgtgaatccggctatgtggttggcggcatctcgccgttaggccagaagacacgtcataagactgtgttggatgaaagcgccctgcaattcgaccagattctggtctccggcggcaagcgaggcctgtctgtgggcgtgaatccacaggacctgctcaaggtcttgaacgccgttgccgcaccaatcggcacgtggtgaccgttcttggctcccctcacggaggggagccaagaatgactacttcttcctgcgcaactccgccggcagcacaaagtgcatgttttctttgatggtttcgacggacttcataccggtgaagcccaagttttgcagagcgtcaatcacaccggacaccagttcgtccggtacggaggcacccgaggagatacctacggattccagaccctcgaaccatgccgggtcaagctcgctggcatcatccacgcgatacgctttgccgcgctcccccaagccctcctgcgccacctccatcagtcgcacggaattcgaggagttggccgatccgacaatcaccacgcaatcggactgctgggccaccagtttgaccgcagcctgacgattcgacgtggcatagcagatatccgaactcggcggctcttgaatccaagggaatttggccttcagcgcggcaatggtatcggcggtctcgtccacgctcaacgtggtctgcgagagcagcaccagcttggtgtcgggcgcaaaatccagcgaatcgacatccgattcatgctcgatcaagtgcacatgttcggggctctcccccactacaccgaccgcttcatcgtgacctttatgcccgatatagacgatttcatacccctcgcgcacgaaacgcagcacctcacggtgcaccttacccaccagagggcaggtggcatccaccacatgcatgccacgacgttcggcttccgccttcactaccggagatacgccatgggcggaaaacaccaccggaatacccgcttgggcagcagcatccggaatctccgccaattcctggacgaacaccgcgccttgcccggccaagtcctcgaccacatgcttgttgtgcacgatctgccggcgcacatataccgggggcagcccatcctcgcgcgtccgctttccggaagcctccgcggctttgagaatggtctgtacggtaagaatcgcacggtccacacccgcgcagaagcctcgcggatcagcgagcacaacgcttttggtcatcggaacctcctgaacgtcaatagtgttttccagtgtaaggcagggattacaggaatctgccgtcacaacttttccgcgtctcccacaaatcaccggtttccaaggaatccacgtgcttctcgcatgatggtgtgagactcgtcactccacgtattgctaccgtgtttgtacgaattgtttattgtatgccgcatatcgccaatccccgcctcgatagaggagacgcgctagactggggccagcgatagcaggagctaccggcccaccaacctcactacgggagtgattccatgacgagtaaaacaccacgcaccggaaatcagtattcgattcactatggcgattattccgccgtcatctgcgaactcggcgccaagattcgccgattcgattatcaaggcaaggaaattttctgcccgttcggcgtcaacgacctgacccccacctgtaacggttatgtgctggccccgtggccaaaccgcatcgaaaacggcgaatacgatttcaatggcaagcattactgcgcgccggttaacgaatatcatcccgcaccgcgcaacaatgcgaaccacggatacgcctaccactacatgtggaagcttgaatcgttgaccgatagcgccgtgacgctttcgctgcgcttccccaacctggacggatacccgttcgatgtgaccgtgaccgtcacctacgaactcggcgacaacggcatgaccgtgaccgtcaatgcccgcaatgatggcgacgagccggcaccgtgggctctcggcctgcatccgtggctggccaacggcaagcagggcgcaactgccgccgaacgcgatgccgactccgccgcctgccacctgcagattaaggccgccagtcatgtgacggtgaacgaggcgctgattcccaccggcaccgaaccggttaccggcatctacgacctgaacgatggcccgacgctcgaaggccgcgcctttgatgatgcctgggtcgacgtggagcgtgccgccgatggtgcgaccaccaccacattcacccgcccggacggtatcgaagtgaaactcattggcgatgagacgattaatgcttggcagtgctacaccgccactggcgcaccgttcgccgagcatccgtatggcatcgccgtcgagccgatgaccgccccggccaatgccttccgcactggtgaccacttggtgacgctcgcccccaacggcgactacaccactgtggtccgctacgaagtagtccagaagtagttctgttacgctggctcccctccagaggggagccaattttttatccttatgtgccgccgcgtcttgggacttatgcgatacgattgtgagcgataacaatttgttccacaaaggagtgtgcactatggctttgaagcctcgcactggtaaccaatatgtcatctcgtccggcgaatggagtgccgtcgtcaccgaactgggcgccagcctgcgcgagctgaagtggcgcggcgaagacctcgtcgttcccttcgacccgaacaaggtcattccctgctgcaacggctgggtgctggcaccgtacccgaaccgagtgaccaatggtcagtattctttcgatggcgaagactaccagatgccgatcgacgagttcgaccgccaatcctccctgcacggctatgcctaccgctacatgtgggagctcgttgatttgcaggaatcacacgtgacgctctcctggcgctcccccgacatcgccggctacccgtttgatatcaccatcaccgccacttatgcacttgacgagaacggtctcacggaaaccttcaccgtgcacaacaacgacagtgtgaaagcaccgtgggcatttggcatccacccgtggctggccaacggcaagcacgccaccggtcaggccattaccgccgacaacgagccctgccgtcttgagctgcactgcgatactcacgtgaccgtagacgaacacctgctgcccaccggtgaagagccggtttccggcatcttcgacctgcgcgataaccccacgctggagggacgtggcttcgacgatgcctggaccgatatcaccaaccgcggtgaagacggcagcacttccgccgtgttcacccgccccgacggcatcaaggtcacgctgaccggcgacaagaccatcaactcctggcaggtgtgcaccggcaacgaaatcggcgagaaggttcgtcaggccggcgtggccgtcgaaccgatgaccgcctacgccgacgccttccgcaccggcaaggatctggttgtgctcgagccgggcgatgactacaccaccgtggtcaccttccacgccgaacaaatctgaaaaaccgaataaccaagcctgacgatcatcgccacatggacacccgtgttgcatcacgtcgtacttatgtggcataattccgaaggcttatttttttactgcagcaaaggagtccatcatgggcatgcgcggacgtaagcgcaagaatcgtcgtaagaaggccgccaaccacggcaagcgtcctaacgcctgattcttcgcgtttcttatagaacgctcaaggcccgtctgatgatacatcagacgggccttgttgtatatgtcgttacttatcttcgccgcagcagtgatcaagcgtggccttgagccgggccatcagacattcgggtgccacatccgggcgcaagtaggcacgcaacgcggcaatcaacgcctgttcacgctcgtcgcagcaggtacgggggtcaaaacagtcgccctccgtaacgatatgcacgtccgcctggaccgacgcagaggccgagccggtatccactgaacgatgatgcaccgccgtgatatgcacttcggtctggctgaccatgccatcggcccccgtacgggttatggagatatggcgagtacgctctaccggctgatcgttcatcagatctcctttcccgaaagcttgcttgactgttgtggcgtgcgggcgccagtcgcatgactatgtctcactacggcttgcgtgtcgccattgctaccaacagtttgttcactacttccattatggccggaatcggcgattcgaccaacgttttcgcccaacttcgcggatggtgaaccagccgacgaaccagtcacgtacccgcgctctttcgcatacgaggcgagctcacgcttgagttgcatgcgggcgcgattcaagcggctcatcaccgtgccgattttcacgccctgctcatcggccacctgctggtaggacttgccgtcgatggcggcgtcgatgaacacctgccggcgttccggcgagagtttggcgagcgcggccatgatttcctcgggcgcgaaggcgtccaaatattcctcttcagcggacttgagcccgtccgacgtatgttcggcggcatcgtaaatgtcccaatcgtcgtattcgccggtggagtcgttggcacgctgcgggcgccgcttggccttggcatactggttgaagtaggcattgcgctcaatggtggtcatccacgcctcgaagttggagcccggctggaatgagtcgaaggccttgaacccgcgttcgaaggtgtcctggaccagatcctgcgcgtcatcgggatcgttggtcagcctcatcgcctgccggtacagtgcattgacggcgggcatggcgagctgttcaaatctggcgcgcttggctgccatggactcgcccgatccggctgactgcccggattgcatagttgcttcgcttgtcgtcacgtttcaccattctaatcaaatcatgtgcccatatcgtggtcgatgacgtgtgagccacaacacgctgcaccccacctgtagaatggcgtatcggctagataatagggagaaacaattatggctttgactttggcttcggccgctgacctgctcaaggaacaccatctgctgcgtgaaatcatccaaggggatgtctggaccgacgacccggcccgtatcgcttcggcggatgagccgttcgccggcatcacctacgacacccgcaaggtcacgccgggcaccctgctgtgctgcaagggccagttcaaggccgaatatctgaacggcatcgacgaagccggcctggccgcatacgtggccgaaaccgagtactcagccgcaaccgccgcccccggcctgatcgtcaacgacgcacgtaaggcgatgagcctgctgtccgccgcgttctacggatatccgcagaacgagctcactgtcatcggcgtcaccggcaccaagggcaagacgaccacctcgtacttcacgcaggcgcttatcaacgccgtctccggcggcaaggccgcattgttctcctcggtcgataattgccttgacggccacacctacgtcgaatccgatctgaccacacccgaatcgatggacgccttccgcatgatgcgcgaggcggccgataacggtatgaagtatctggtgatggaggtctcctcccaggcgtacaaggtggaccgcgtctatggcctgactttcgatgtggccgcgttcctcaacatctcccccgaccacatcagcccgatcgaacaccccacattcgaggattacctgtattgcaagcgccagatcatcgtcaacgcgaagtcgctggtactcggcgcggacagtctgcacgccgatctgttgcgggaggacgcggaggcagccggcatcggcgtgaccaccttcgccctgcatgacgcggataatgccggcaccagtgcggacgtcgtcgcctggcccgccgacccggcgcacgcctccttccacatcgccgacggagatcaggcccttggcgactaccatctgtccatcgatggcgacttcaactacctcaatgcggcggcagccatcgccatcgcccatgcggttggcgtatcgctcgatgacgccgacgcactgcacgccatcgaatccgtacgtatcgccggccgtatggaacagttccgcgacccgcagtcaaacacgctcgccatcgtcgattatgcgcacaactacgcatccgtcaccgcgctgcttgacttcgtctacgagcgttggggcgaggaaaacccgcgtatcacgctggtgaccggatcggccggcaacaaggcctacgatcgtcgtaaggaaatcgtcgaggctgccgagaaccgtatcgcgaacttcattttcaccgccgaagatacggacaccgagtcgatcatcgacatctgcatggaaatgcaaggctacatcacgaacaaggatgtggcctccacggtgatttccgaccgtccgacggccatcaccaacgccatttacgatgcccgtacgcacgccgaccgattcaacgtcctgctgatcatcggcaagggcaacgagcgttggatcaaggaccatcacaagcatgtgccgttcgacggcgacgatcacgtcgtcgaacgcatgtttggcttgtgacgggattccggccaatcaaatcctgatcggatcccgattagcccacatcagatcacgcgcaatacgaccaaaccagaaacacgacatacggatacaaacgaaaaaggatagctgaatcgtaatgatcacgttggagaaagttgacggagccacactggaagccgaagccgagaaggccggcatcacgttgcctatcgaacagaccaaggtttggtctggttttcaggcggatatcgacggacgcacaccatggggcaattatctgatcaagcgtgatggtgaattggtcgccgtgatctcctttatcgattttgagacgcacggttatcattatctgcgctcgatgcatgggccggcgtgggtcgccaagcccaccgaggctgaggagcgcgaggtcgtcgacgccatcgtggacaccgtcaagaaggccgacaagagcatcgcgttcctgcgtatcgacacctggttcgccgatggtacggagaaggtgctgtccacagtgccgtacgaccagaccgtggtcatcgacatcaccggtggcgatgatgagattctggctcggatgaagcgtcgtggacgccgtgacgtgcgcaagtctctacgtgaatgcccggccgaggttgccgatgagacggataaggccctgaccgatttctccgaatattacgatgtgatggtcgaaaccggccagcgcgatggattcacgcctgctccgatgagcgactactccgatatgatcggcgcgttgggtgccgatcattgccgtgtgttcgccgcacgtattgaagaccgtgtggtggcatggtcgattgtcaccgtgaacggcacgcatgcggtgcgctactatgccggcatgcgcaacgaggttatgcgtctgcatgtgaccgacaagctgctgtattccgaatgctgcatcctgggctcgcagggtattacggaatacgatctgatgggcatcggctccgatttcgcgccgtcgctcaaggggcttaacgagttcaagtgcaagttcaccgaggaaatcaccccggtggcccccgcccgcgacgtacccatcaagaaggtcttctacaagacgctgcagactgtgcagggcgtgcgcaaggcattacgctaataccaccccgctcccgctggtgggagctgtcgagcgaagcgaaactgagggtggtctttcgagatggaccaccctctgtcacctgtggcaccagttcctaccagcgggtaccattcgtttatcgttcgagtttttggctcaccacggctgttacgccgtcggctcgcatggttacgccgtagagcgcgtcggcaatcgacatggtgcgttgctggtgcgtaatgatgatgagctgcgcatgggcgcgtagctcattgaacgcattaatcaaacgggtcaggttcacgtcgtccaacgcggcctcgacctcgtccatcacatagaacgggctggggcgggcggtgaaaatcgcgaacagcaacgccagcgcggtcagtgaacgttcgccgccggacaggaggctcagctgtttgacgcgcttgccggccgggctggcctcgaccagtacgccggtggtgagcatgtcttccgggttttccaagcgcagtcgcccggtgccgcctgggaacagcgtggcgaacatctgctcgaatgcctcggcggtatcgtcgaacgcggatttgaatacctggaccatcgtggaatcgagatccttgatgagctgcatcaaatcgtcacgtgatttgaccacatcgttgcgctgatcattgagatacttgttccgctcctcaagcgcttcgaattcctcggtggccaaagggttgatcttgccgagtgcggccagatcgcggcgagccttatcgagacgcttcttctgctcctgacggttatacggcacggtcttaaagcggtcggaatcgccgttggtgccggtctctcccccggtttctccctcttcggtctcagcctcagcttccgtctcatccaacggcacagggttgccctcatcatccagcacgggcaccggctgttcggggccgtaatcactaaccaattcctccaaagtgagaccgagttcgtcggacactttttgcatgagctgcccggattcggcggctaaccgttcgcggtttacatccaaggcatgttcgcgcccggtcagatcggtgaccttgggctcgatctggttgcgctgcgcgcgcagggccttgagttcctcgtcatggctggaggcggcggcctgcagctcgtctcgtttggcggccacgtcatgcagcgtatgctctaccatggcggccactgctcgcgcgtcatcggccacgccttgcaggtgtgcggcctgctcgcgtctgcgatcgttcaacgcctcgatgcgggcgcggcgttcggcggtttctttggcgttgtcccgcagcagcccggcctgtcggctcagtgactcccctttgcggcttgcttcggtccacgcgatttttgcggcgacctcatgctcgcgagtcaggttcagttcgcgctccagcgtgcgttcgcgttcatcgagttcgtcgaaatcggcatgttccgctgtggattgctgggccgatgccaaagcgcgattgaggtcgtcaagcttgagctgatgctcgttgcaattctcttgggtctcggtgattttcctatccagctgctcgagctgacgggtgaacgatgcgacgcgatctgtggcggatttcagagatttctccgcctgctgggctttgagccgggcttcggtgcgtttggcggattcctggtcgacgagtcgagccgcttcatcgcgcttggttttggcctcggccacttgctcagccattccgccgtcttgggcggtcaactgtttgacctgtgccaatgctttgtctcggcgggcggccagagacaggtccgattgagagattgaagagccgccgaccgccgccacgccgtgtgtgaaggtctcgccgttcttggtgacggcccgcatggcttcgccgaatgccacaatctgttgggcttcgtcggcggtgccggccgcggctacatcagccagcaggagacgcacggtgcgcacgaccgcttcggcctgtgccgggttctcggcatccgggttcgcggtgacgagtgctgccagcgcgttgcccgattgcggggcggcccccgcgttctcggcgctactctcctccgactccgtgcccggctctgtggcgggatcgccggcaatgctcgcggtcagcaccacggctttgccgagcttatcttcccgagcgcgttcgagggcgtgcaacatgttgcctgccgcgggtaccacgatggcgctggcatactggtcgagcgcgtgggccacggcttcttcccagccttcggccacatggatgaagtcggtgagtcggccaagcgaggccacgtccgtatcgcgctccaacgatccggaggcattgcggctgtctagcgtgtcggcaagcgcatcggccttggatttgagcgagatgatcttggactgtatctcgcgctgcttatcggcgcgttcattcagtcgttcgcggcattcggcgagcgttgcacgcgcggagtccaatgcggcaccgtcatcgtcggcaacggagtccgcttcgctgcgcaatgcgtccagctgttgctgggcatcgtcgcgctgggaaaccagcgagtcgcgttgggaggcgtaatccttggcgcggctggtcgccagttgcacggcggattcctcgcgggcgatgagttcgcgcagtcgggcgatttgcgcatcgcgttcctgtgcggttttgcgcagttccgtcaaggtctggcggactgaggcaagctttttctcgtcgtcggcgcgttcctcggtagccttgtcgagtgcgatgcgcgcatcggccacggccttggtttgtgccgcggcctgagactccagttcctcggctcgtttgacgagcatgccgggatcctcaccgaagttggtgacgatctggccggcgagtgaccggctgcgctcttcggccaactgggcgagcgcgttcagtcgttcacgggtctgcgagaattcatgccagtattggttggccttggcgatggccggactggattcggagctcaacgcctcgacctgttcgatgcgtactttgacttgggcgagttcacgttgggcgacggccagctggttacgcacatcgccaagctcttgacgtaccgtgtcgcgacggctcatcgagcgttgagcgtcttcggcgtacaggcgggcttgggcgtcacgtacggatatctggatcgcgtcggcgcgccgggagatgcgtgcctggcgtccgagagggccgagttggcggtgaatctcccccagcaaatcgtcgagtcggctcaggttcgtttcggtattggccagcttgcgcaacgcgcgttccttgcgcttgcggtgcttcaggatgccggcggcctcttcgatgaacgcacggtggccggacgggtcggccttcagaatcgcatccaatcgtccctggcctacaatcacatgcatctgctggccaagaccggtatcggagaggagttcctgaatgtcgagcaggcgacattgcgagccgttgatcgcgtattcggagcccccgttgcggaagatggtgcgggagatggtgacttccgtgtaatcgatatcgagcgtgtgatcggaattatcgatggtcaggctcacctgcgcacggcctaatggcgggcgggaggacgtgcctgcgaaaatcacgtcctccatcgaagtgccgcgcaggtttttggcgccctgctcacccattacccagatcagggcgtcgacgatgttcgacttgcccgaaccgttggggccgacgaccgccgtgatgccgggctcgaagcgcagcgtggtggcggaggcgaaggatttgaatccgcggagggtgagttccttgagatacatggcgtgagactgttttccgtatgccgggtgtccgggtatccgatatgccttggatgcgggttaccgggcgtcggcggaatcgtcggtgtcggcgctggctgtgtcagtgctgtcggtgtcggcactggccgtgccggtgccggcgtcaccggcgtcaccggcctgttccttaccgaggccgaggacgtcgaacacgtcgaagtcgtccgggcttaccgaatcctcgaggttgtcggcggcctcatcctcggccttgtctgccggctgatccgaatcgtccgggtcaaccgccggctgatgaacggccatagcctgcctcatcgtggggctggcgtgttcctcaagcatcaggcgtgcgtcgccggcggtgacgaagctgccgcagataagcacgccgtggccgtagcccacgcccagctcgtcctcggcatcgaccatattgacggcggtctgaatcgcgtcaggcaggttcgcttccttgatcacacggtcacgaccgaacacgtccacggcaatcttctcaagctcgtcggccggcatcacgcgctcgcgccacgagttctcggtgaccaccacggagctcaggatcggctccagaacacccagatattcctcgacctgcttgtcgcgcatcatggcgaccacaccgaccagctgcttgaagtcgtagctttcctcgatggccttgcgcagggcttcggcggcattcacgttgtgtccgccatccagaatgatggtcggtgaggtgcggatctgttcgatgcgtccgggaatcttgaccgagctcaacgcctcggccaccaagtcgccgtccagcgggccgttgaccggaatcaccacttcggaggcggcgagcgcggcaagcgcgttgtgggcctgatgctcgccgaacttggcgatcggcacgccctcgtaagtgccgttgggcgtggtcagggtggcgacttggccgccgactgcggccatgcggtcggacgcggtcatttcgtagccgtcgcgcacgagcatggcgtggttgcgttcggcggcttcggtgagaatcggcatgacggcttcctcatgcggctgcgggccgatgatggcggtgcagttcggcttgatgatgccggccttctcggtggcgatctgttcgacggtgtcgcccagccactgcatgtggtccatgtccaccgggccgatgatggccgcatccgcgttgagcacgttggtggcgtcccacaggcctcccatgccgacctcgacgatggccacgtccacgggcgtgtcggcgaacttccagatggccatggcggtgagcacctcgaagaagctcatcttcggcttgccttgctcctccatcttggcgtccaccagggccacgagatccttggtctgatcccagatgtcgatgaaatcgtcgtcggacagctgctggccgtcgatggcgatacgctcgttgatcttctccagatgcggcgacgtgtacaggccggtgcgcataccgtaggcgcggcagatggcctcggccatgcgtgcggtggagcctttgccgttggtgccggtgatatgaatcacgcggaacgactgctccgggtggcccaggatgtcgagcatcaggttcatccggtcgagatccagattggtggtgttatgctccggcgggcggctcatgatgtccagttcgacgtcccgcatgctctcattgttccgattcggatgctcgaatgacatatcctcttctaacctctgctcgtgttgctgttgcaccgttcggagtgcgtatgccacttacgtgttcgcgccattctcgtcatgtctacgcatgcccgcatatattccgcttccgcatgcgcaggaagctccccttgcacaggtttgccccgcatggttcgggattcttgccttcacgcgtggagccgcactccctcaattccctctatcctagccgccggggtggtttatcgtgcgcgcacagtgaaaccgtctcatatgtcgccgccgcgcgggcagtctctacctgcagccacgcacagtgaagccgtctcatatagttgcaatgcggctcttgccgtcggcatcccattcttagtcggttgtaatccaaaacttgtatgtccggcgacgctgatgctattcagcgtcggtacagtgccagcttctggcggtacaccgacgctatgatgctcttgcgcgtcggtagctggccaaaacctggattaatcccgactccatcgcctctcagtgtcgtctcctcgccaaggcatgccattctgccgtcgttgagaaatttcaacgtcgtcaatcgaccatgtcttgccccggaaacgactctcacaaacgtcctctacatcatcttttgaactcgcagaggctcattcactgttatgactgctctcaccgtcggcagccgtccaagccctggatctatgccgccaataaattgcagcaaatcgtcggccccgatacaaccattggactcacgccgacgctagattccacactcagacagaagccagccaatatctgaaccagcaccgacggcgtacaaagcataagcaccgttaaccgtcaattcgccgccctctaccagctacatccgccttcgccgatgatatcttgttcgaatccccaaagcacgttgttcgaatgacattactgatggtggataagttttgtatgttatccactattccgaattagcggcctaataccttgaaatcatcgggagtatctcgctccaagacagccaagctccgaggctagaaccacaatggctgaaattcatacttacgctgcttcgttccggctacgctcgacgtcatgaagacacacaaagcagtggcctcgctcatatcagccgcgcagaatgagctgagatgcgtctattcaagaaatgaagcggaacagaccgctctacgccgccgtgcccagagtggtgagttgttgaaagtgtatgacggcattcccagtctttatgcaaatactgcatactgggatggtttgacgccgccggagcgaacgttgcacatggcccgcgctcttgcgcaagagcatcctcagtgggtttttggcggcttggtggcagtaagtgcctatggattcgaacatcaatggcatttgcatgatgactgcataaccatcgtgacttccgatcatggatctcgtcaatgccatcagcgcttacgacatgtctatatgcccgatatgaacaatccgaagacacattacgaggcctccggcctatccctgatatcaccggctagaaccttggtcgaggccgctatagaccttgattttcggtttgcgttgccgatctttgactcggcccttgccaagggaataaccaaggaagagatagccgccgactgcgttcaatggagaatcgattatgcccgagtattccgcctgctgcgctatgcaaacgaaaggagcgagaatggtggagaatccctcgcgcgaggcaccatcatcgaaggtcgcttcctcacgccgcgtattcaggtaacggtgaccgacccacagacgaataccgagtaccgcgttgatttcgtatggaagctcgatgacgggcgcgtgatagtggccgaatacgacggcacacaaaaatacgtggacccagccatgaccgataaccgcagcattcaggaggtggtggccaaggaacgcgcacgcgacgagggactgaaacgagccggtgccaccgaaatcgtccatttcacatacgctgacgtcatcgaacgcactccgctgcgggtaaaactgatcaaagccggggtgcctcaggtggagacctccgcatagcagtgagtcccgcgacgcgataaaccttcatcgcatgggttcacatggattcagcccgcagaatatgtcaatatcaatcggcaagctccagcccaagccaatgcccctctccttccctgccgagaacaataaacgggcccgcattccagcccgccgcactcgccatatgggcatgtccggaagaccgtccaaattccgtacttggttttaccgtcagccgtcaatcgtggcacatcgcataaagccgactaatatgaggtgggaatcgatgattcgacaacaactacatacaggagagtggcaatgggtgaagtgatcaccgccaaggacaaggaatatgaggccgaagagcgcgctacggcaccgggcgcgaaccagtcgatgagcgaccgcgtgaacaaccgctcgctgcgcccgcagtcggccgcattcaaggagttcatgaagtccggctgggccgacgatgatccggagatcaatcctctcgaatcctccaagttcacgccagcccgccttgaggcgctgggcaaggccttcccgggcgaacgtctggtcattccggccggccagccgaaggtgcgcaacaatgattgcgattacatgttccgcccggacaccacgttcgcctactacaccggtctgggttccgattacgaggccggcgccgtgctggtcctgaacccggtcgaccccgactcccccgaagccgccgccggcaagacgcacactccggaactgttcgtggcgccgcgcgccgacaactccaccgaggacttcttcatgtccgcccactacggcgaatactgggttggcccgcgtgccggtctcaaggagatgcaggcgatgaccggcatcgaaacccacgacatcgcccagctggccgacgccctgtccaaggacgtgggtgccgaagccggcgccgtacgcgtgcgcgtggtcagcgaaaccgacccgcaaatcacttcgatggttgaatccatccgcgaggccaacggtttcgccgatccggacaagaactccgcatccgacgacaagctgcacgagttcgccgccgaggcacgcatggtcaaggacggctacgaaatcaacgaaatgcgcaaggccgtggacgccaccaagcatggcttcgaccgtctgctctccgcactgccggccgcgctcgacaagccgcgctccgagcgtatcctcgaaggcgcgttcaacgccgtgtcccgtgaactgggcaacgccgtcggttacgactccatcgtggcctccggcccccacgccccgattctgcactggatgcgcaacaccggtgtggtgaagaccggcgacatgctgctggtggatgccggcgttgaggtcgattccctgtacacggccgacatcacccgcaccttcccgaccaacggcaagttcaccgacttccagaagcgtctgtaccaggccgtgctcgactcgcagcaggccggtttcgaagccgccaagccgggtgccacctactccgacatccaccacgcctgcatgcgtgtgatcgccgagcgtctgcacgattggggtctgctgccggtgagcgtcgaggagtcgctgtccccgcaaggccagcagcaccgccgttggctcgcctgcggcgtggcccaccacctgggtcttgatgtgcatgattgcgcgcaggcccgtttcgagtcctatcagggcgcgccgattcgcccgggcatgatcttcacgatcgagcccggcctgtacttccgcgaggatgatctgctgattccgccggaataccgcggcatcggcatccgcatcgaggacgacgtgctcatgaccgagaacggccccgaatggatttccgccggcatcccgaagcagatcgacgacgtcgaagcctggatggccgagcaggctacccaagcgaagtaacctaagctccctctgatgagggagcttcttttctactaaggaggcaatgtgtccactccggaatttgtgttggaattgcgtaagaagatcggccatgatctgttgtggctcaatggcgtgaccggttgtgtactgaacgaacatggtcaactgctgttggggcgtcgttcggacacgggcgaatgggcgatggtctacggcatcaacgagccgggcgaacagccggcggacacggtggtgcgcgaaatcaaggaggagacgggcatcgatgccatcgtcaccgatttggtggccgtcacctcgtcaaacaaggtgctgacctacgccaatggcgacaacaccatgtacatggatcattcgttcctgtgcgccctgaagcccggcggcaatgccgagccgttcgtgggcgacgaggaaagcctgagcgtcggctggttcgatctggatgacctgcccactcccctagcggccagcacgagcgagcggctggagctgttccatacttacatcgagaacaaaaagcacggcgacgcccacgccctgttccagttcgatgggcagcagtactagcggatataaagttagctccctctgacgagggagcttcaatgctatgcgattacgcctcttgggctaggagctcgtggaggtgggcgcggtgttgctgctgttcgcgcgggtcgggcacgggcagggaggccagcagcttcttggtgtacgggttctccgggtgctgcataatctggtcggcatcgccgtgctccacgatctggcccttatgcatcaccatgatgcggtcggcaagcatatcgaccaccgccaaatcatgggtgatgaacaggcacgcgaagccgatttccgcctgcagtcgcttgaacagctccaacaccttggcctgcaccgacacgtccaatgcagaagtcggctcatcggcgatcagcagcgacggcttcaacgccaaaccacgcgccaaagacgccctctggcgctggccgccggacagctcatgcgggaaacggttcatgtaggcgcgcggcagctggaccatctccagcaggtcgcccacatagttcttggcatcggccacggaaccgtacttgtggtgcacgagcagcggctcggccacattctccgcgatggtcatcagcgggttgaacgaggagcccggatcctggaacacgaaaccaatgtccgcgcgcttgggcttgaagtcacgctccttgacgccgttcatctcgatgccgagcacgttcagggagccgccggacaccttctgcaggccggcgatggcacggccggtggtggacttgccggaaccggactcgcccaccaggcccagcacttcggagcggtggatggtgaagttcgcgccgtccacggccttgaagtcgggctgcatgagatggcccgggtacgtgatggtcaggttcttggcctcgacggcgatcggctgttcgcgccaatcggccttgcgctcgatcggtttgccctcgcggtcgcgcacgaccagcttctgaccgatgcgcggcacggcacccagcagtcgcttggtgtagtcgtccttcggatggtagaagatctgctccacgtcgccctgctcgaccacgtggccgcggtacatgacgaccacctggtcggcgatgtccgcgatcacgcccatgttgtgggtgatgatgagcacggaggcgtcgaactcgtcacgggcgaggcgcagcaggtcgagaatttcggcttgcacggtcacgtcgagggcagtggtaggctcgtcggccagaatcagaccggggttcagcaccaacgccatggcgatgacgatgcgctgcttctggccgccggagaactggtgcgggtagtagtccacgcgggtttcggcatccgggatgccgaccttcttcaggatgttgatggccttggcgcgcagttccttcttgtccttcatgccgtgggcgcgcaggccctcttcaatctgccagccgatggtgtacaccgggttcagcaccgaattgggctcctggaacaccatcgcggcctcggaaccacgcacttcgcgcagctgttcgccgctcagggagagcacgtccagcgaatcggagccatcgcgcttggacaggtagacggcaccggaggtggtggccgtctccggcagcagcttgatgatggagcgcgcggtcacggacttgccggaaccggattcgccgaccacgccgaccacggtcttgcgcggaatggtgaagttcacgtcctcgacggccttgatggagccggcgtcggtcatgaaggagacggacaggtccttgatatcggcgagattcttgttgttttcgctcatctctcactccttgccttccggcttgccctcgccggtccattcggaggcgacgatggtcgggtcatggtcggtgacggtggccggcgggtcgacgttcgcgtcgagttcggcaatcacctcgttgcgtgcggtcggcttctcgtttgggtcgacggacgtgtcttcgatcgatccgaccacttcgccggcggacttgcgggcgcgcagacgcgggtcggccagatcgttgagcgattcgcccacgagcgtgatgccgagcacgatgagcacgatggcgatgcccgggaacacggcagtccaccaaatgccggcggtcacgtcggaaaccgagcggttcaggtcgtagccccattcggcggcggcggtcggctcgatgccgaagccgaggaagcccaggccggcgagggtcaggatggcttcggacgagttcagcgtcaggatcaccggcaacgtgcgggtggagttcttgaacaggtgcttggtcatgatgcgccaggtggaggcgccgaccacgcgcgcggactcgacatacgcggattccttgatgcggatcacttcggcgcgaattgtgcggaaatactgtgggatgtacaccacggtgatggagatgccggaagccaggatgccgctccacaggccggactggccgtgggagatcatgatggccatcagaatggcgagcagcagcgaggggaaggagtagatggcgtcggcgatcattaccagaatgcggtccacccagccaccgtagtagccggacaccagaccgagcagcacgccggcgaagatggagagcagtacggccacgacgatggcgatgacggcggtgcgggcaccccacaccacacgggagaacacatcgaatccggcggcggtggtgccccagatgtgttcggcggagggcgcggcctgcgccgggaaggacgtgccgtcggcggccttgatctgggcgtggccgtagggggcgatcagcggggcgaagagggccacgagcaggaagaacgcggtgatcgcgagaccggtgatcagcatgcctttctgccagccgaccgccacgcgcagttccttgatgatcggaatcttggtccagaacggcgtcttggtgctgacgttgagcttggtgaggcggtcgtcaccggggacggtgatcttgtcttgggatgcggtggtcatctcagtacctcactctcgggtcgataagcgcggcgatgacgtcgacgaggaagttgacgacggccacgatgatggcgataaggatcacgatgccctgcacggccacgaagtcacgggccttcaggtactgggacagcatgaagcccaggcccttccattcgaaggtggtttcggtcaggaccgcgccggcgagcatcagggcgatctgcatgcccatgacggtgatgatcgggatcagggccggccgccaggcgtgcttgttgagcaggcgcttttcggagacgccgcgcgagcgggcagcctcgacgtagccggaattgtaggtggagatgacgttggtgcgtaccagacggatgaacacgccggcggtcaggaggcctagggcgacggccggcagcacggcgtggcgcagcacgtcgacgagcacgttcatgtcgccgagctggatggcatcgatgatgtagaagccggtcggcgataccagacgggtgaactgcatttcggagttcaggtcggagcggccggaggctggaaggatgttgagccagacagcgaagatgagcttcagcacgaggccgaggaagaacaccggggtggcgtagcacaggatggcgaaggtgcggatgccggcgtcggcggcacggtcgcgtttgcgggcggcgagtcggcctaggccgatgccgacaatcagcgccacaatcagggcgaggaaggccagttcgaatgtggcggcgccgtagtgcgtaagaatgctgatcaccggctggttatcggtcagcgtcgtgccgatgtcgccgtgcagcaggccgccaagatagtcgacgtattgcacaatcagcgggcggtcatagccggccgcgtggatgcgctgctgaagttcggcgggtgtcaggcggccgcccagggcggcggaaatcgggtcgccggtggcgcgcatcacgaagaacacgatggtgaccagaatgaaaacggtgggaataatgagaaggaacctcgtcagcacgaagcggaagaaactacctgacagtcggttcttcttcgtcttggctttcgccggagtggtgctggaggtcgctatggcgctgtctgacacgcgatgctccttggtgttggtaatcggtatataaagcaataaaggctcccctctccgaggggagctggcggcgaagccgactgaggggagtcatacgagttgggctcccctcagtctgccgtcggcagacagctcccccctcaaagaggggagctcatgctggatcagcccttggtgacggaggcatagcggaagcggaaggaagcgtcgagggtgacacccttcacggaggtgccggtgacggcgacctgggcaccctgcagcagcgggatggtggagaggtcttcggtctcgagcttctgaatctgcttgaggatgtctccacgagcggactcgtccttctcaccggcctgcttgacgatcaggtcgttgacttccttgttggagtagccgttgttcacgaagttgccatcgcggaagaacggggacaggtagttgtccgggtcggagtagtccgggaaccatccaagctggtagaccgggtacacaccgtcggaatcgtcggtaaccacacgatccttgttgtactgggtccattcggtagactgcatgtcgaccttgaacaggccgcctgcctcaagctgggacttcagggcagcgtattcgtcggcggagacagagccgtagtggtcgctgttgtactggagcttgaggtcgaccggggtggtgacgccggcgtcggcgaggaccttcttggccttctcggtgctcggcttgccgttgccgtcgccgtaggcggacttcagcgtgtcatcgtgaccggccaggccgtccgggatgaaggagtacatcggggtgtaggtgcccttgtagaccttggtggagagctcttcgcggtcgatgaggttggcgacggcctggcgcacggccttggccttgttggcgtcggcgtcgggctgggattcgccgtagggctgaatcttgaagttgaaggcgatgaagcgctcctcaccgcccgggcccttgacgaccttgaccttggagtccttggagaggtcctcgatgtcggtcgggctcagggagcggttggccacgtcgatctggccctgctggacggccatcttcaggttggaggcgtcggcgaagtacttgacctgcacggcggagttcttggccggggtcaggcccttgtaggagtcgttcttggcgtaggcggcggactcgttgatcttgaaggcggtcagcgtgtacgggccggcaaaggccttcttggagacgatggtgtcggcgtcggtgagcttgtcggcgtcgaaggtatcctcatcgacgatcgggccggcggggctggacatgacctgcttcagagtcacgtcaaaaggcacggaatccttgaacaccacggtggtgtcgtccttggcggtcacggattcgacgttggcgagcagggagctcgggccgttcgggtcgttgatcttcttgatgcgatcgtaggagaacttgacgtcggaagcggtcaggtcgttgccgttggcgaacttcaggccgtccttgagcttgacggtgaattcggtgccgtcatcgttccaggtaccgtcatcggcggcgatgtccgggctcagttcggaggtgttgtagtcctgggcgtacaggaacgggaacacctggatctgcacggcgtatgaaccgttgtcgtaggagccggcggggtccaggctggtgatcttatcggtggtgccgatggtgatggcgttgccggaatcggcgcctgcggtggtgtcatccttcacaccgccgcaggcggtcagggatgcgatggcggccacggagacggcggcggccagaatcttcttggaattcaacaggaatcctctctcataacttgtttccacgtcatcactgcgggcgtggattaccgcctgactatggtgcggatgtgttacctctgcgtttccatagtcatcgacttatgtttcgcttgtggcgaccaaggccggttttatgcggtatcgagcagtattacggattcttgtattacgacgtgaataacggtcacatggtgagacaaatatactatcatctcaccatgtgaccatgttcgtagacgaatgccttccattcgtcaaccggtcggcctactgctacttgagcttgcggcccgcgcaccacacctgttcgaccgtccagtcggccgggcccgcaaggttgaaatcggcggcgaagccgggggcgatgaggccgataggcgccccggtgaccgggttcggccggtcgaagccgaacgccttggccggcgtcagagtggccgcctcgaccgcgtccaccggactgaagcccagttcgcacaccgcacggcgcacggcgacctccagcagcagagtggagccggcgatggcgccgttggagaccaggcgcgcatgcccgccgaccacgttcacgtccagcgcgcccaacttgtaggcgccgtccgggcagtcggtggcggccatcgcgtcggtcacgaaggccgtgcggtgaggcgcgaaccggaaggagaggctcaccatcggatcctgcacgtggaatccgtcgttgatgagctcgatggtgacgcgcgggtcctccaccgcggccggaatcggaccgggttcgcggtgatgcaggccgttcatcgcgttgaacatgtgggtcatgatgcccgcgcccgcgtcgaagccggctttggcggtctcgtagtcggcgtcgcagtggcccacggccggcaccacgccggcagcggcgaactggcggatggcggagatgccgtggggcagttcgggggcgatggtgatctggcggatgcagccaagcttgccggaggcggggtcggcaccggaggcctcaagcatcttatcgacgatgtcaggcaccggatccttgagacattccgggtcatgtgcgcccttgcgggccagggccaggaacgggccttccagatggcagcctaggatgtcggggcggccggactccattgtggcgcggacggtgcggatgttgcggcagatcacgtccacggggttggtgatcagcgagagcacctggcgcgtggtgccatgcacggcgtggccggcccgcgccacgtcgatgccgtccggcccgtcatcgaagctcttctcccatgcgccgtgcgcgtggatgtccacgtagccgggggtcagaatacggccttcggcgtcgatgaccgcgttgcgatcggccgggtcgagccccaccgtgcggcagcagtgctcgaaggccccctcccccgtgccggccgccacgatgacgccggcggcatcggagacgacccaatatccgcgccgttcgccgcgcgcatccaccttgcgcgcgttacgaatcgccaccggagccggcttgccctccagtgccgcggtcacgcgcgagactatctcgttcctatcagacatgttgttctccttaccgctcatgcgctcccgctggcgggagccagcacacgataactcagatgccctgccaggccggcttgtgggtgtaggcgtaacggtagtagtccttgtggcgcaggcgggacgcggcctcctcatccacgataatcgtggcgtgcgggtgcatctgcagcgcggaagccgggcagaacgctgacacgccgccttccaccgtctcctcgatggcttcggccttgccggcaccgaacgccagcagcacgaggtgacgggccttcatgatcgtgccaataccctgcgtgatgcagtgggtgggcacttggttgatgtcgttgtcgaagaagcgcgcgttgtcgatgcgggtctgttcggccaaggtcttgacgcgagtgccggaggccagcgaggaaccgggctcgttgaagccgacgtggccgtcggtgccgatgccgaggatctgcacgtcgatgccgccagcggcttcgatggcacgatcataggccgggccggccagcgcgatcttgtcgccgtcttcaagcggagtgccgttaagtacgtcgccgggcacatggaccttggccgggtccaggccgagcggttcgaccacagtgcgatggatggtcgcatgataggactcgggatgggtcagcggcagtccgatgtattcatcaagcgcgaaaccacgcacgcccgaaacgtcaatggcctcgtccttgacgatcttggcgagcgcctgataggcggccagcgggctggagccagtggccaggcccagcacggcgtccggctttgctttgatcaggtccgccacgcaacggccgtagatctcgccggcctcggcttcgttcttgacaatgatgatttccggcatcggtttcctccagttccgtgcggcccgcccgatgcgagtcgctgtaccgccgcccgtcttgcggataatggcaacatccttgtcacgtccgggtgccgcgcggcgttccaaccaccgttcggcgtagcgccgattggtgattcgctatttgttaatgatactaacaattttggaccttatgaacactcacggtgtttcctgacgcttcacacaggtacactggaatttattagtgaagtttcataacagtttcaacgacgaaattgcgcttcaccgtctaagctgtgtatggaacaacaatcgccgtccactcgctcaccatcaggcaggaggaaacatgtcatatctcggtctcaacacaacgaccgacgaccatgcggccaaggcttcccccgccgatgtgcgccgcaagaaccgccaacttatcttcaggttgttgttccccaccaaccagtattcgcgcgccgagctcggccgacgcaccggattgagccgcgtggccgtttccgatgtggtcggtcggatgctggaggaaggattgctgcgcgagaccggtcaggcacccagcggcggcaaaggcaaacgaggcacactgctaagcatcgatatcgatcgactgcgcatcatcagcatcgacctgacgcaggagcacctgctgcacggcgcagtcaccaatctgctcggccagccgctgcgtcacgccgaagtcaccctgaacaccggctcattcgtttccgtggatgtgatcatcgagctcattgagaagatgctgggcatgtccgatggcgaggtcatcggcatcggagtcgcctcccccggcgtggtagacaacggcgtggtccgctcctccacgatgcgcggctggaacaatctcgacctgtccacgccaatcgccgaacatttcggacttgaagtaaacgtcagcaacgacgccaccgcagccatgctcaccgaacgtttctttggccaaggcgggccgaatatgcttttcgtgcgcatcgaaagaggcatcggttcggcgattctgctctcggacacgccggtaatcggcgaactgcacgcggctggcgagctcggccatatttccatcgatcttgacgggccgctgtgcccttgcggcaagcacggttgcttggagacgatgatttccggaaccgcattgaagaagcaactcagcgcagcagacgtggagcagcatcagggtatccttgctcgggcgggccgctatcttggccaagccctggccatgcctgtgggccttttggatatggcagacgtatgcgtctatggccagccgaacatcatcaacgcgacgttcatcggcgcggcccagcaatatctggatgccgccacatcctcgtccttccacaaacacacggtgattcggcgctgcgaatgcggacctgacatcaccgtacagggcgaggccatcgccgtggtcttccaacacttggccaaataaaagccggtcaccccggcaacgaaacgcgcaagaccaagcgcggcacagcacgacataaagcgatataggactgcgtgggagatggggcctcggagacaaatctgaggcctcatctcccatgccccggcactatgccaggctacgccgccatggcggcaccgatggctccgactggttggccgacaggtgccagacgcagccgggccggcaggtccagcgtttcgaggaatcggcattgcgattcgcgccggcgcagctcagccgtgatcacctcgaccaatggttcgccggttttggccatgccaccgcccaagatgatgagtcgcggatcaacggactgagccaggatttgtatggtgtcgccgatggcgcgcactaccatgtccagcacatcgacggccttggcctcccgctttttcgcgcgacgaatcaggtcgggcatcggcgggtcggcgttgggccacagacgccccacggatgcgcccgagcagactgtttccaagcatccgtattgcccgcaagggcacttgaggcgatgaggttcgactgggatatggccgatttcgccggccgcgccgctatagccatgcatcagcacgccgttttcgacgatgcccgcagccagtccggtgccgaagttcaggaacgcaatggtaccggccatgccgtccgcaccgcccaatacggtggccgcgccgacggcggcggcattgacgtcgttttccacatgggccggcacgcccgaacgctgcgagaccaacggccccatatccagcgagaccacgtcgagattcacgatattgcccacatgcccgctggccgaatccaccgtgcccggggtaccgataccgatggccctcacctcgtcaaaacgctcacccgctgcctgatgtgctacagcgacgatgtcttcgatcacggcatcgttgccatgcctggcgggaatacgggcggaacccaataccgtgcccattgcgtcaaccagcacagcttcgatttttgttccgcccacgtcaacaccgattttgagattgttcatagtgttttcagacatcagtcctcccctgttcttcatcgaacgtttcgcttgatatcagtgtgcatccgactattgacaaccatcttaacaaattaccccaagacgacactcacatgcacgacacaccgaatgacatattgattgcgtcaatcaattaacagcgttaatatcttaatcaagttcagattcaaagacgagcggaacaactcgcagcggtgcagacaaggaggacttaagaccgatggcaacaaacaccacccacgccacttcccaggccagtgtctccgaatccaaccgctcccgcatcgtcaagcacctgtatcacaacggcatcagttcccgcgcgcaaatcgccaaggcactggaactcacccccgcggccatcaccaaaatcaccgcacgccttatcgaggccggcatgattgaagagaccggcgatctggaaggctccaagaaccgccgttccatcggactcaagctcaacaccacgcacttccgcatcatcggcatcaaattcgcccgctcgctggtgcagatcggcgtgttcgacctgtgcggcaacaccctgagctttgaaaacctgcccacggtgtgcgacaacaccatcaacgactccatcgtcaccatccaccagcgcgtcgaacaactgctcgacaacgacccgtccatcgtggccatcggcatggcagtgcccggcccctatctgcgtaacgtgggccgcaccgccgtggtgtccagcatgcagggctggcgcagaatcaacttcatcgacgaattcgccaccgctttccgcgtgccagtgttcatcgaacaggacgcccgcgccggcgccctcgcacattatctcttcgacccgtcggtgcacgccgacgacaacctcgcctattatctggtcggcgaaggcgtgggcctcggcgtcatcgacaacggtcgcctcatcaacggcttcctcggtgccgccaccgaaatcggacacatctccattgacgtcaacggccgcccctgcgattgcggcaacgtcggctgccttgaacgctactgctccacccccgccattcacgatacgctcatcgccgatggcaccgtggttcccggcgcggccgatatgacccacaccgaagccgcccgcgccctgttcgccaaagccggcgacggcgacgaagcggcaatcgccattgtccgcgaagtcgcccgatacgtcggctacggatgcgtcaccatcttcaatggatacaatcccgagcacatcatcatcggcgacatcgtgtccgaagccggcccgatactgctcgatgaggtgcgcgccacggtggccgaacgggccatccccgaaatcaatgcctccacttccatcagcctatccaccttgtccgccgacgcggcggtctccggtgccgcagcagtggcagtgacccaattcctcgaacacccctcggtgttcttcgacgtctcctaaaccaagcgccgacatcacaagattttccatacgaaacacccgataaaggaaacaaaggaaaggaaaccaaccatgactaccccgatcgttctgagcctcggtgaactgctgtgggacatgctgccgagcggcaagcgagccggcggcgcccccgtcaacttcgcctaccacgcgatgaagaacggcaccgaaggctgggccatcagcgcggtcggcgaggatgaactcggcgacgaactgattgccaaggccaacgaggccggtatcaacaccgtcatccagcgcaatgcctggccgacctccaccgtcgaggtcgcactgaagaacggcatcccggagtacaccatcgtcaagggcgtggcttgggaccacatcctgtacacccgccagctcatcgacgtggtctccaaggccgacgccgtctgcttcggcaccctggccctgcgctcccccgaatcgcacgccaccatcacggagctgctcaagcacaccaagccgggcgcgatgaagttcttcgacatcaacctgcgcggcgaccactactccaaggagcttatcgaggaactcctcaaggcggccaccgtcttcaagatcaacgacgaggaactcctgctgctgcgcgacatgttcgacatccgcggcacctccggcgaagatgcctcccgctggttcatcgaggaattcggccttgactacgtgattctgaccgccggctccgcctactccaccatcatctcccgcaagggcgaggtctccacgctggacactccgcacgtcgaggtgaacgacaccgtgggtgcaggtgactccttctccggcaccttcaccgcccgcatcctgctgggcgacacgctcgccgaagcccaccgcaaggccgtcaacaccgccgcctacgtctgcacccaggccggtgcctggccgcagtacccggccgagatgcccgactacctggctgaaatcggcaagtaatccaaaaccacctattttcccgatggctttgccgtcctataccggcaaagccatcctgttttaaaaaggagttaccatgtccattcgtgacaccgtcaccggcgtccagcatgtcggcattccgaccacggatctcgaaggcaccatcgcctactacgagcgtctcggcttcgaatgcctcggcatctatcccaacggtgaggaccgctgcaccttcctgcgcctgaacaacctgaccctcgaggtgtggaccatggatcccaccccgatggaaaacggtgccatcaaccacttcgcgctggattccacggatatcgaggcgtccttcgctgaagcgcagaagctcggcctgaacttcgcggaaggctccatccagcacatcgacaccttctggagcaacggcatccgttacttcaacgtactgggcccgaaccacgaggtcatcgaattctgccaaatcatgtaacaccctgatggaacccggcaacaggactatcactattcactagtcatcatccattgatcgatcgatctgtcatacgtccatttatagagaaaaagggaatacatatcatggacaagaccgcatccaagaacgtggcgtgggtggaaagccctgacggctaccttgatcgcacgccagtattgcaattttcaatgacttcggtgctgttcgccttctaggccatcgccgcaagcctcaatgacattcttatcacccagttcaaggccgtattcgacctgagcgacatgaagaccgcgttcgtgcagtccgcattctatgccggctacttcatcgtggccatccccgcctcgctgttcatcaagaagaccagctacaaaatcggcatcatgaccggcctggcgttcttcgcgctcggctgcttcatcttcttcgtggaccgtatctccgccagctacccgctctcgaaggtccgcgagactcgcgtgctgaccgtctacatgattatcggctgcgtgattcttctcggcaccgccttcatcctgccccgccatcgagctgttggtcgtcggcctgtacttcctgactgaattcaagcgcgacacgtacaccccgccccagctcaaggccatggacgagaagaacgaggcctgattccgccccctttgttcgtcattcgtgtgacttcacgaatcgactgaccgcaaccggtgagattctccgaacaggaaatctcaccggttttttcatatggtgtactcacggccacgctcttcacatcctttcgcgtgtcttcaactaaagcggtttagaataatgctgttcccttgatatgtatatccctcaaacaaagaagttgaatttatgacgaccaccgcgataccgaagtcggtctcggatttcttgcagcgcatcacggacctatgtggcaccgaacacgctgattgggccgagaacttcaacgcctgctttgccgataccctgaccaccacggtcaaacggcatgacgacggcaccacatttctgctcaccggcgatatcccggccatgtggctgcgtgattcgaccgcgcaattacgcccttacctagcccttgccgccaaagacgacgacattgcgaacttgatcgccggtctggttcgccagcagttccgctacattaccatcgacccgtatgcgaacgccttcaacgaggaaccgaacggtgcctcctgggacaaggacgatcagtccgacttctccagcccttggctttgggagcgcaagtacgaggtggattcgctgtgctaccccatccagttggcttggatgctgtatgcgaacaccggcaacaccggtcatttcgatgccgaattcattgccggcgtcaagaagattcttgacgtattcgagaccgagcagcatcatgaacgctccccgtatttcttcatccgcgacacggacatccccaccgaatcgctgagcaataacggcaaggggtcgccggtggcgtacaccggcatgacctggtccggcttccgccccagcgacgacgcctgcacctaccactatctggtgccctcgaacatgttcgccgccgtggtgatgggctatctggaacgcatcttcggcggtgagattctggatgatgccgatatcgccgcacgcgccggcgagctgcgccgcaccatcaccgaaggcatcgaaaaccacgccaagacgacgaaccgcaacggagagacaatctacgcgttcgaaaccgacggtctgggacacgtcaatatcatggacgacagcaatgtgccctccttgatggcggccccttacttggggtactgcgcaccggacgatccgacctatctggcaacccgacgcacgctgctcagcgacgaaaacccgtactattacgagggcgagtatctcaagggcatcggctcaccgcacaccccgccgcactatgtgtggcccatcgccctgtctatcgaggcgatgaccagtgacaacaaggacttcaaggcgcatatcctcgaccgtcttgtaaccaccgacgccggtacacatctcatgcacgaaggcatcgacgtggacgatccgaccaagtacacgcgcgaatggttcagctggtcgaatatgatgttctgcgaactggtcatggactatttcgacattcacgtgaagcactaagacgtgtccgccgcatgctcatcgcgcacccaccgcatgttctcattaaggaaaggaacaatcattatgaccaataacccacgttatacgctcggcaccgaagccaaccgcattttcatggcttccgaaacctacgagctgctgaagttcggcaaaggcttcccagcgccggatggcggttccggctggctgaacgccgacggcaccctcgacccctcacacggcgtcgaaacgtggatcaccagccgtatggcccatgtgtactcgattggcgccatgctcggatacccgggtgcgggcgagctggccgacgcggcgctcaggggattgaccggcattctgcacgatgacgagcacggcggctggtatccgcaggtgttcgcggacggcacccatgctccgggcaaggtctgctatgcgcatgccttcgtgatactcgccgcatcctctgccctgctggccggacgtccgggtgccaaggaactgcttgacgaggcgcttgccacgtatgacaagcatttctgggatgacgaaatcggtttggccgtcgatacctggaacaccgaattcaccgagctcgacccgtaccgtggtctcaacgccaacatgcacaccaccgaggcgttcctggccgtggccgacgccaccgggaacaacacctatcgcgtccgcgccggccgcatcatcgaccacgtcatcgaatgggcggaacacaacggatggcgcattcccgagcatttcaagtccgactggtcagtcgatctcgaatgcaatgccgacaagaaggacgaccagttcaaaccgtatggcgccacgccgggccacggcatcgaatgggcgcgtcttatcgtgcagtgggcgttgagttccttcgccaatcgggacggcgcgcgaccgtacatcgacgccgccgagcacctgttcgcgcgggcggtggacgatgcgtggaacgtcgacggcgcgcagggactcgtctatacgaccgactggaacggcatgccggtggtcaccgaccgcatgcattggacggcggccgaatcgttgaacaccgccgccacgttgcacgccgccaccggcgaggcacgatatgccgactggtacgccacattcgcccgctacgtcgacgagcacgtcatcgaccacgaaggcggatcatggttccaccagcttgacggcggcaatcatgtgatcggcacggtctggccgggcaagtccgacctgtaccacgccttccagtccacgttgattccgttcctcgacccggccgtgtccatcgccaccgcggtcaagaacgcggcctgaccggcaatatcttagccttcttatctcctccttcaacgacgttggccccccgcttgataacgagggccaacgtcgtatggattggaagtgctgactcagaatcggtggtttctatattccacaggagttacagggtttggccgtgctgtccctgaccgccagtttcggggtgaggattcgacggttgccgctcacctgttcgccggcgagcactttgagcagcagtttcgccactttggcaccgtattcactggcgtcacgatgcgctgaggtaatcgacgggtacgctgcctcacaaataaagctgtcttcaaagctgacaatagcgggcaacccgttcggataacccgcagattgcccctcccctgttttcagttgcccggtggtatatgcttcggccatggcatgcagactggccgcggcaagaatttccgtctcgtagatgaatgcagtaggaggcttcggcgaacgcaacatctccagcgtaagcatcgcggcctgctcggcatcgaaattcgtgaactcgatgttgatggattccagtttgcgccgttttgcgaacgaccgaaacgccgacacacgcccctgcgaataatcgagattggaatcgccggacagataggcgatacggcggtgccccagtgacgacagatgttcaagcacggtgcccatggtgcgcgaatcatcgatggacagcgacggtacataattgttcggatcagggccaccggccagaaccgcacgcacacccagttccttcagcagtttcgggcgtggatcgtcggctcgcagatcaaccagaatcaccccgtccacacgcttgcgtgacgcccagtccctgtagacgctcatctcctcgttcagcgaacggcaagggcgatacagcaagccgtatcccttagggctgagcgaggtatgcacaccggccatgaagtgcaacatgaaggtttcgtccgtgagtccctgtgcggagcgtgcgggggcaaagcctatggtcatggttttcgacgagcccaacgcttgcgcggcatagaccggcgtccacccaaatttggccgcagcctccttgactcgtcgtttggtttccgcggaaacaccaggccgatcgttgatggcaaaggacaccgcggtttgcgaaatgcccaactcatccgcgatgtcttttaagctcacacgctgcgtgcctgtggacgatggtgatgcctcgcgagcaaatcccatgaataatcctccttgcagccacgctgcgaataccacgctacaacagattatttcccactttgggccgcatgtaatcagctgtgttctaatacctatgatatcaacaactaaaacgttttagtctatgggtctcagcatatgttcggatataaaaagcgggatatagggggtgtctacagggacaaccaccccatatcccgcttaaggcacgggtatcaacgcacccgcatacgcagcgaaactattccatcttgctacgagcacgaagcaccaccgtgcccgctccgagcaacaccactgcggcagtcacaatcgcaataatcgaagagcccgtcttactcagcgaagagtccgatgcgccattcttatcattgttcttgttgttgttctggccaggcttgttgtcgccgggcttattcggcttgtccggctggccgggcttgttcggggtcgccgcgaccttggtgaattcgatggcgacaccctcaccgatggacttgtcgcccagtgcggccttcaccgtgtacttgcccaccttcgtggacacgacgttcagtgaagccacgccagcggcatcagtcttgacagtggcgttgccgtcaacggccgtgacaccctcgggcagcgtaaacgccacctcggcgttggtcagcggattgccgaacgaatccttgaccgttgcctgaatcgtacgtgtagccttgccgtcggccacggccgagccgtcaacggcggtcagcgtggactccttggcatccggctgggtggggtcggcgaccgtgcacttggccagttcgtcggcggtcggaatcttcaccggatcggtcttgttgccgctgtaatcctcgacctgcacccgcagttcatgactggcgggggatggacctggtgtatgaggcaggtgtggtacgaccacggataataccagtgattggcggagtgttctgcgagtaggtgtagctagcacccagctggttctcctgctgctgcttgccattctcgccaatccacttctcggtcatgtacaggtagcgccagtcttgagtctcaggacgggccagcgtcacattatcgccattccagatcaccgagcaagccggatacggctcaatggcggcatcggcaaatgcacctgttgccgtagcggtagtgccacctgcattatcgacgttcaccacatagcgggagctgtcaaccggcgcattggcaatcgtcactttgctcttgtcggcggcgaccttgacggtctgggaatgcggcttcgcggcgtaacgccacgaaccggtgtcggatttgacggtcacggttttctcgccggatacctgcggattggtccaagagaccttgacgttgccgtccttgcctggttcgactttcacgtcggagacggccgccgcttcgttcagcggcgcttcggtggcgagcgaacgcgagccgtccgcgcccacggcgtagagcttgagcgtgccggtcttcttacccgcgtactgggacaggtccacgctcgcggtcttccagccgttgcctgccgaaccgtccgtcacgtccaccggcaccacggtctcggggtcgtcggcaaggatgaggccaagctgcaacttggaatcatcgctgttgagcttgttgtaggtcaggtcaatcttggagccggcagcgacatccaggtcggtcttgtacaggcgaatggtgttgtcgttggagagcttgccgctcagcaccagcgaatcgccgccttcgtaaccaccgaccttggtgtacttgaagcgtggtaccgcctcgtagtccttaccgtagtcgaagtcggcctgcagcgggtcggagtcggcatcgatccaccactgccatgtcggcagaatatcctgcaggttgatgttgccccactgctggtcgctggtccgttcgccgccatcacgccattcgagaccgtgaccggtgttgaacgacgtagagaacatggaaccgccaaccacggagcattcggcgatctgggaagcgaagcccttccaaccgtcattgctcgtgccgtcgtcgatgtaattgtcggcgatgtcggtggtgcccttctcgccggtggacgagccggtccacattcggcgttcgcggtcgaacacctggttctggtatttcggatagaccttcttgtcgtcgcccagttcgcgggagacgaagtcggcgccgagcgcggcgaggctcacatacggcttacctgtatcgtcgagattgacgttcatatagcccgcattgctgccgatactgtcgaacttcttctgtccggactcgatgccagcaaacaccgcatatttcggatcgatgccgaaactctcggcgtgagcggccgaatccttaagcatgttgccgctgaaccagtagttcaggaagatggaatcagagatcttgcccttgtccgtatcctgcacatacggcgaattgctgccgttgaacatgtcttggtagcctacgccgccacccgggtatgtggctgagtcgtaccactggatgtaaatgccctgatcgacgatctgcttcatgaagtcctggtaggctggaacatcgtcggcgacatcgccaacttcaaaagcgcggcccacctggccgcctacgccggcatcgctccggccaccggccagtccggcaccagcatcaagggcgagagatcctccagacggggcaacaaacgcctcaggaacgcgctgtggcagtccttgttcgtcgcgtccgccaaacacccgccgtccatcgcctactaccaacgcaaacgcgagcagggcaagcaccacaacgccgccgtcatccgcctcgcccgccgacgctgcgacgtgatctacagcatgctcaaaaacggcgtcctctaccaggaaccagccctcgtagcctgaaccgggccacacgggaaaggacgccggacgccaccggcagggcgaagcgcgcccacgacagccagccggaatcccgacacgtcaactccccaaggagttgacaaaaacataggaacacccccatggcattgtgtcggtggcgctggccggtgcggccaacgccgccagcgtggtcatcgacaataccgcggccagaccgctgcacagccatttcctgtgttgagcccgggcagaagtacacccagcgggatcgcctagtgacaatctcatctataatctcctttgacttcttccggcttacgccggagatcaaccgtctgcgtactacttcgtccctaccgatgtgggccatgggatacggcgcttcgcatatcgcgccgtatcccaaatactgtttttcggttcattcgaaccggtgttatccgcggcggcggactgcgaatacgctgataccggcgagcgtcataatcacggcgaccgatagcacgacggtgccatcggaaccggtgcttgccagacgtccggttgcagactgtggcttgttgtgtgatgcgtcaccggaactaggtttgtccgtttcgcctgtgcctggctgttgcggcttgggcttgccgcccgttgcatctgcgattgcggtgttgagcgatgccgtccaggagacaacgtcagctccggtatacagcttgctggtcaggccagtgaccgccgcgtttctggccgtggtcagcgttgtccgcacatcggtatcggttgcgccgtcagctagcaatgcatccgccttggctatggcaccggtaagtgccgtggtgtcgatggaggtcagggaaagttcgagcgtcggatcatatgtgttgctgtatccgtcgttccaatccgcgccgagcaccgccttgttcacctcatacaggttggtggccgctgccacggtttggcgcgtttcggctggaacatccttggtataggacatacggtcaaggaagtggttggcagcctgcttggcgttttccagactcatgccttggctttgtgcgatggctgtcttcgtccaaatcagattcgacggtttgatgtgtgccaaatcatcgtcggaataggtgcgtccgtcgcggtcgagcgcgtagacgaacatgcctccgagattgtggtcgtacgagtatgaggccacatcatagaaatgactgtccaggtatggttcggtcgcgtcgttccaccggttattcatgtcaccctcttcggggaaggtcaggccgggaacgaacttggtcgagtcgataaactgttcgtaggtggcagcggccttggccgtccggttcgaatcggaaccgtactgctggtaggcaacatagtcgaagcaatcagaaacgttcttaaacggagcagtgtagctgccattggtgtcgtaaaggaacatcgtgccttccgggttatccgacttcggcccgatgcgcttggcgagggctgtgatgacctgatcggaaatcgccacctgcgcggcatccgggaaagtttccatatcgatgtcaagaccgtcgaggccaaccgaggtcatgtacgtttcgatgacatgatcggcgtacgcgtcataatccgattcggtcgcgctatcgacgtttttgccctgctgagcaatccacgtcttgaaaccgtcgaccataacaccgctgtaatccaaacctcgtacgagtttgatgcctcgggcatgcagatacggcgcgtaatcgctcttgagcttgtcatagaacggctgggccgccgcttcctggccactgggaacgtagctgaacacattgacgacatcgatgccgtatggaatgtcgtacatggagatccaattgtcatccggtaaatcggtgttcacgcctttcatggtcacgtcacgccatgcgcggtaatacaccatgaaatgcttgttgccgttaccctcctgcgacgccgcaacgggggaatccccctcctgggcgttagcaaccgttcccatggccagcgaacatccgagcatcagtgctgtggcgactacgcccgccgcgacggcggcgagtctgcgtccgatggacgagcgcccttcactaccttgtgagcaacacatatataatctcctttgttgtttcctctatcgggtgacaacccgcagacttgcaggttgcgaggatggatgccttgcggtttcaggctccatccgggggtgtgatgcggttccagtgcttcgcaccccacattcatacatgccccctaatattcccccggcagcgtcgccgtgaccgtatgcgtcgaatctccatccagcgtgcaggtcacctgaacttgcccgtcaccgacatcccgcagacgatcacacggcacgtggaacgcgatatcgcgacgctctcccgcgttcaagtccatgtataccgaatcgacaagcattgccaaacgtgggatgcggcggccgccgctgacatgcgcgaacagattcacggcacccgcggccccgtgatcgtcagcatgtgccgtcacctgcaccagcacttcacctggatgcgattgcgtatcggcgtgcatctcgctgaacgtcaccgccgccagcgaaccggctccatagccgaagccgcgcaatatcggttccgccgcatccttgtagacatgcgcggcactttggcggtcattgtatcgaacgggaatggctgcgggatatgcgggtaaggtcacaggaaggcgaccagacatgtcggctccgtcaaccaatacgtcggctacggcctgcggcccatattggccggcatatccggcccagatcgtcacggcggagcgttccagcacatcggtcagtacatgcgcgcgaccgcacaccgccaccgaaacaattggagcggtggtcaatgccgcgacttcacctagcatgtcatcctgactccagggcaggcggatgtcagacaagtccacgccttcgccgcaggtggcaccgtattcggttacggccttcgccgcgccattgtcgtcgaattcactgtcatagctgcgttcgctggtgctgccgcatacgaataccacggtcgacgcacgcgcccattgatcggccggcgcatcgctcggcttggcggccaagagaacccggtcctccccgagacgtgccaccaattgccggtagacgcttgactgttcatcggcgggcagaggggcggtgtaatcgcccaggaagcagccgaaatcgtcggcgaacgggccggcgacaatcacagggccggcttgagcatcagctatgacgctgcggatatcgtcgagcgtggcggcagactggccatcattgatcagcgttatcgcctcgcgggccatgcgcttggcctgctcacgcccatccgcagtggcctgcgcgatggcgtcggcgctcggcatggcaattgcggcggtatcggcaccgtcttcgggcaagagaccgaacatggctttgagttccagcacccggcgcaaggccgtgtcgacagcggccactacctgttcgtcatccgcatattcttcgaggcgggtgaatccttcatcccacagggagacgtccacgccggcgagcagtgcggcacgccctgccgcgggaatggagccggccatgtcttcgagccgatccacggccaggccatcggccatcacgatgccgtcgaaaccgagctggtcgcgcagataatccttgagcagccacgggttggcgcagcaaggtacagaatcgatatcgttgtaggctgccataaagcccaaggcaccggcgcgcacaccggcggccaccggcggcagatgaatttcatgaagatcgtgcgggcccagtacggcggactgtccgttgcggccgcccacggcctcgccttgcgccgccagatgcttgagcaccacggccactcccccgtggccgaccttgctgcgatgctcaccctgcatgccggtaacgatggcctcgcacatgcgggcagccatcagcggatcctcgccgaagcattcctcgcaacggccccagcgtgggtcacgggcgatgtccaaaccggataccaatgcgatatgaatgccgctggcggccagttctgcggcaaccgcggcttccgcttcctgcaccccctgcgggtcaaacgtagcgcccaaacccagattggtgggcagcaccgtgccgcccagcgcctgatgcccgtgaggcgcctcttcgctaagtaatacgccgatgccgtgcgcgccacgttccagcacagtttgctgcaccacggcaatcgcctcagtccgctcctcagggcgtatgccgttaccccaatgttgaccagaccatgggtcggctcgcaatagaccgtacagggtgccgagtccaccccatcggtcaatctcctgcttgagctcgtccgaggccaccagccgtcccgcagcattgcgttccacggacttccaaccgagcagacgctggttcaactggccaactttctgcgtgaagctcatcgaatcaatgagtcggtccactgcggcgcaattgatgctcattgagcgctcccccttctcgtatattgtcttctcgttcttctcgctcttcggcgagtaccgggtcttatgttttgccctgcgcactgcaattgtgcgcactgcaattgtgcgcactgcaattgtgcgcactgcaattgaaaatatccggccgtggaacaaggagtagatgattccacaaccggatatcggtttaatcagccgtttcgaacgatgggtccgaaaccgcagtgtagtaacgggcggcataggggtgttcgtcagcgtgcaattccagaatgccacgctgcgcgagcgcctcttgattggccgccacctgcgaggtgatgatggtcgggcgctggcccgccacctgcagcttcatccacaggtcgcacgccgagcctcccgggccgagcgcactgcggttcaccgggtttccggcctcatccacatcaatcaccacggcgacggtcttcggctgagccggcaatgcggaacggtactgtgcggcgagttccccgaacgtacggccgatcggcttcagctggccttgctcgtcgaacaagcccagagagtgctcgaagaacgggaagtcttccatgctggcgggcacatcgtgcgagcaccaccacgtcacaccccacaggttccggcaatccatggcacgttcaacggtcttgcggcagaattccggcgtgtagtcggtttccagcacattctccggcgcaccgacttcctggagccacaccgggcgctcggaatccttgccgaacgccttggccagctcggccaggtacagtgcgtacgacgagcactcctcactggtggcgccgtatccttgcgcgatgccgttgaacacccaggagtgaatcactgtcatatcacccttggtggcggactgcaccggagtgaacgggtgcccatcgatgaaccaggtgccatcgttgacgctgtacagcgcgttgtgcccttcaccggcggcggtcggaagcagcgcgtccagccatgcgtcgatctgccggtccgtggcgctcatcttcgtgggatgcggcctgtcagacagctgattgacctcgttgcccaaggtcagacccttgaacgcgggttccttggacagctcatcggtcatggtcttgaccagttcacgctcggccgcaacggcgtccgcatcggtgaacatgttgcccgcatgccaggtgaccagccatgaaggcaggaagtcgaagctggacagatgcccttggaacacgtccacataggcatccaaaccgtgctcgccggcgatgtgcaccatgcggcgcacatccgccacgcccttcttgttgatccaagtgcgattaggttgcagatacggccagatcgggaagatgcgcacatggtccatacccagttcgctgatctgcttgagatcgttgtcgatgccgtcccagtccgggtcgagccatgcgtggaaccagccatgcgacggcgtgtagttgactccgaatttcattggagtacctccttttttccagtccgctcagcccttgagtccaccctgttccaagccacggaagaagtagcgctggaagcagcagaagaagacgatgatcgggataagcgagacgagcgcaccggcggcgatcagtcgcggatcttggatgaacatgcccttgagtcggttcatgccgagggtcaaggtgtacttgctttcatcggagatcgcgatcaacggccacaggaagtcgttccaggcaccgacgaatgcgaagatgccgacaacggtcatcgtgcctttgacctgcggtacacagatgtggaagaaccgctgccataggttggcaccgtccaccatggccgcctcttcgagttccattggaatggatttgaaggcgttggtcatgagcaggatgttgatggcaccgcacaggccaggcagtgcgactgccagcagtgtgttctgcaggtggatggagcgaatgatcaggaactgggagatcatcacgccttcgatcgggatgaccatggtgcccatgaacatggtgaacaccagtccgcggccacgccacttcaggcgtcccagtgcgtagccggccatcgtggagaagaccacgttgccgaagatggagatcaggcagaccaccagcgtgttgagcatgtagtggaataccgggacctgcttgaacacggaaatgtagttgtccagcgtcggggtcttcggcatcaggtagggaggcacggcgtagacgttgtcgcccttgcccttgaacgacagggacagttcccagacgaacgggccgacgagcagcaggaacatcagaatcagaatcagatactggacgactttgccgacggtgaccttatgcgtgttggtattcatcagtcctcacctcgcttttgtacgatctgctgcacgatgagcatgacgccgacgatgacgagcacgacgatggagatggcgctcgcgtaaccagtgcgggcctggataccggtgccttcgcgcttgataagcatcgacatcgtcatatccatgccgccggggcctgcggagccgttggtcaacacgtagatttcgttgaagactcggaatgcggcgatggtggacagcatcatgatgagcatcatcgtggagcgcacgccgggcattgtcacgtagatgaactggcggacagggccagcgccgtcgagggaggcggcttcgtaaagggattcatcgatgttggcgagggcggtcaggtagatgaccatgtagtagccgaggcccagccagattgtcacgaacatcgagctgaagagcacgccccatcgatcggtgaggaatggaaccggcttggagatgatcttcaatgccttgagcacggagttgaccagaccggcggaatccagcaggttggtccagatcatacccaccacaacggcggacataaccaccggcatgtagaaggcggtgcggaagaagcccatgatgcgggagttgcccttgaccagataggccaggatcaacgggaggatcaccatgaacggcactacgcagatcacgtagagtgtggagttcagcagtgccgtgaggaagtactcgtcatggaacagtttgatgaagttttcgagtccgacgaaggttcccggacggagcagcgtggagttggtgaaagcaagcctgaaagtgttgagtgccgcaaggacgatgaatacaaacacaatcacgaacgctggcagaacaaacaggtagggggcaatgatggtgccgaagctacgattctgcttcttgccgtgacgcgtgttcatcggttcaggccggtcggaggccgtgcgggcctccgacctgtcagcggcgagtgccgcgttgctcactgtgcgagcttctcgtttgcgaactcgacggacttgtcaagggcttccttggcggtctgcttgccctgcatggcgagggcgatctgctgctggaagttcttgtagccgttgttgtcggtaaactcggccggacgagaaccgtagccgtccttgacctggtcgagcgtgatcttcagagccttgccctcaagggtgctctcgtcaatgctcttgtagtagtcgtcatccagaccacccttagcggacgggaacacggaggccttcttgtcgaactcgatctggttcttctcgttggtcacaaagcgggcgaagtcgatggcgacgtcggggtgcttcgagttggcgctgatgccgagcatctcgtaggccacggaagcggacttgccgtcgttgctgatacgcgggccgactgcgaggttcttgtagaggtccggagcgttctgcttaaagccgtcagcggagtaggcggagccggccatggagaccaagttgccgcgctggaagagatcggcggcctggctccaagaggagtcgagggcctccggcgggatgccgcccttcttgtacagctcaacgaagcggctgatctgcttgacaccggcctcatcattgaaggtgtacttgctgtggtcatcattcatgaaggacttgacgcctgcggtcatcagatcttcggcgttgtaacccatcgtggtgcccaggtagacatccttgcagttctgcacgatggtgtcgccggcggcgaagtattcatcccatgtggtcggaatcttgttcggatcaaggccgcacttctgcatgagctcggtgttccagtaggtcgggccatcgttgacataccatggcaggccgtaggcacccttctcgacgccattgccctgcatggtcacggacttccatgcgccttcgtagtagtccttttccgcatccggagcctgcttggagacatcgagcagcgcgccagccttggccagaccgtacaggatggagttgccgccgtcgacgatgtccggcagttcgccggccgcagcctggctggacagcttgtcttcgtaaccatcggacggggcgtcaagccacttgacggtgacatccgggtggtccttctcataggccttgatcagcgcctcgaaatacggggtgtacttgtcgttcttgaggttccaggtctggaaggagatctccttcttgccgccgtcatcccccgcagttccgctaccacaggcagccaccgatacgagcatcgcaccggcaccggcgatggcgaggatcttcttcatagaaaacatacgttttcctttccttttggttcctttttcgccccgccctgctgtggacggagaaaacctaatcgttgtgttccggtacagtcacccgtcgcggtgattgacgtggtatcacaacctttattcagttctcatcgctgagactaaaccgttttagtttccagccagttatgaacctgttaactaaatcggtttagtaagaatataacacaatcgaaacatgcacgcaacgaattcatcctcgcgtgtcgcattgatatttgcccaacgaaatcgtcccctcttctcatacaacaatgggccgcgcccaaccgtatggcagagccggtctactccggttccgttacggttgggcgcgacccaaaatatcgagcctaggcccaatatcccttatcggcgaatacgcagcgtggtgagctggaacggcgccaacgagacgaccgcaccgtcggcaggcatcggctcgtcgccggcgagcgcgcgcggcaattcggcgtccagttccggctcctccatgagattcacctcctgcacgctggccttagcatcggcgagagcggcgtcaaggcgtagtgcggccgcggcattgccgccggcggcctcgtacaggcgcacaatcagatcgtcggaaccgtcatcggcgagcttgacccagtccaatacgatggtgccggtgacgtcggtgagcgagaccagcggggccaagtcaggcaactcccctattacagggctgttgagtcgcgccgcctcgtccagcactgcgttcatatcggcgtcagcgaccagagaccatgcgaaggagtgcgcgccttggtcggtgcgtgggtcagggtacagcggtgcggacagcagcgacaaccgcaccatggtgccgcggccggtgccatgtgccgtatcggcgtggatggggctgacgtcggagccgtaggtggaggcgttgaccacagcgacggcatagtcggcgtcggcgatacgcacgaagcgatgcgtgcagctttcgaatttggcatcatcgctgcgcgtgttcttattgatcgggcgttcgaccaggccgtattggcattcatattgcgcgttcaccgcttgcacggtgaccggcatatccactttgaggaactgttcgacggcatgccagtccacatcggcggtgaagtccagtgtggcggagcccggccttaaggcaatgcccgtacgaatttcaacgcccttcgcgcgagtgacagcatgcacgacggccccaccgttggcggtttcatccacgcttgtaatcgatgcctcgctgagcgcgttggcggtgaggaatgcatcgcgttgaatatcccaggcgtcccagtggaagggttcgtctttgagcatttcgtagcggcccagtcgggtgccggctggcaccagttcacgattggttcgctgatcgacgattgacgaaacggtgccgtcggcttcaatgcgcacgtgcagttggccgttgtcgagcacaatcgcatcgccgtcatgggtaacggcgacccgagccatggatgcggttcccgcttcggctcggctcgaagccgggcgtaccacccacgcctcacaggcttggcgggaatatggggcgattacggcgtcggttatggttgcgtcatcgggttccacggctgcgatcgcgcgcccggcttcaaaggcgatctcgttcagccgagcgacgtcacgcgcgtattcgacccgcgcctgacggtgtacccatgcgatggccgaaccgggcagaatgtcgtggaactggttcaggagcagcgttttccaaatacggtccagctcttcgcgcggatagacatagtccgggttcttgatgcgggccgcggcgcacaggtattcagcgacgcgcagcatcgactcctcctggcggcagccacgcttcatgtcctgctgggcggtgagggtggcacggtgcagttcaaggtacagttcgcccttgaacaccggggtctctccttgcgcatcgtcgacgatatccttgcgcacgcggtcgaacagctgatcaggagtaccgaaatcgattttcggcgcaccggcgagatcatggtcgcggcggatgcgcgcggtcatctcacgcgtgggaccgccgccgccatcgccgaaaccgtagagcaggattgcgttgcgggaaagatccttgtccaggaaattgcgctgcgaatacatgagctcgcgcatgctcatcgacgagcagtaggtgtcagagggtgggaagtgcgtgaggatacgcgtaccatcgatgccctcccacatgaaggagtggtgcgggaacttggtggtgtcgttccacgagatcttctgcgtgaggaaccagtcgaatcctgcacggcgggcgatctgcggccaagagccggtgtagccgaaactgtccggtagccagataccacgcggcgtgacgccgagatgctccttgaaatatcggcggccgaacgtgatctgccgcaccaatgattcaccggaaggaatcatgttgtcagattccacccacatgccgccgaccgggatgaaccggccttcttcgatgcgccgcttcattcgtgcgaacaggtcgggatgttcttcttccagccatgcgtactgttgggcggaactcatcgcatacgtgaagtccgggtcttcgtccatcaaagccagcacgttggatacggtacgggccaccttgcggcgtgtctcgcgcaccggccacagccatgcggagtcgatatgcgcgtggccgatggcaatgtggttgattgcactggatgcagccggttcggcgagcacgccggcgagcgccgcacgggctgccggcacggtttccaagtcgcgttcatcgtagatgttcaaggagcgttgcagcgctttggcgagctgccagtagcgcgggtcgtcgtctttgagttcgcgaatcagggaagatacggtttccaagtccatgtcataggcaaacacgtcttcgttgaagatggtgatatccatgcgactcagtgtgtatgggaagtcacaggcgccggtggcctcttcgccgagttcggtgggcgagaacggggtggggccttcgacgaatgggttggcagcggcttcgatatagacggtgaagtcgccatgttcatcgagttctacagtgctgctgccgtccgcgtagacgagtggaatccagtggttgcgtgggttcgcggatttgatggcggtgccgtcggcacgatagacaagtccctcggattggaatccgggaccgcggtgatcgagccagccgaggtctaccatgagttcgacttttcgtcctttgaccgccgccatgtcgatgtggccgttcacctcgaaccatgtggtgccccatgtggtgccccaaacgccgggaacgcggaaaggttcgaagggcacttggccgttgcgcactttggctagaaattcgctggagggcaccggttcgccgggattgtggaacgaacgcaaggtgcatgcggcgagtgtggtgtggatatgcggtttgacgcgctgctgcatgacgcggtcgcagcgctccaactgctgattgggcagaagaaacatggagagttctcctttgctgtgtctggtgggaatgatggaaatgatgggtgtggtggtaatttggaaaaccgtaatacgacatgtttctgcctcctcatggttcgaggaggcagaagcatcagatgggaattcagcgcgtgatgcgcagggtggcgagctggaacgggccaaagtgcagcgtggcaccttcggcgttctgcctaccgtcttgcagcgcgactggaaggtcggcggccaaatcgtcgccttccagcacattggtctcatgcaccgaagcgcctgcgagcgccgggcagacgtgcagcatggcatcggcctggccgccggccgcctcataggcacgtacgatcaggtcgccggaaccatcatcggccagcttcatccagtccagcaccacggtgccattgacggactcaatcgaggcgagcggcgtgatatcgggcacatcatggagtaccggtgcgttgagcacaccggcggcgtcaagcgcacggtccaccgtggcgtcggccaccacggaccagtcgaactcgtgcgagccgatatcggtgcgcgggtcggggaaggtcggcgcggagagcaatgacagtcggaacatagtgcccgagtcacgaccttcggcggcgttcccggcgatcggtgaggcatcggacccgtataccgatccgttgatgacggctgcggcgtaaccggcatcaccgataatggcgaaacggttcgtgctgctctcatacttggcttcgtcggatgcggtgtttttgacaattgggcggcggatcagaccatactggcagtcgtaggtcgcctgatcggccacaatgcccagaggcagatcgaccttgaggaagcgctcgcgttcgtgccaatcgacatcggcatggaagtcgagcgtgtgcgagccggggcgtagcgtgatggtggtggtaatgacggtatcaccgtcggcggtatgcacgtggacctgtgccgcaccgttttcggtattcaccgactcgattgatccggtcacggcattcgccatgagcagggattcgcgttcgatctcccacgcatcccaaacggcgggctcgtccttcaacagctcgtatcggcccagtcgggtgccggccgggaccagttcatggttatgctcctcatcaaacagcgaagaaatcgtaccgtcggcctcaatggtgacggacagtacgccgttggccagaagtacacggccgttgtccaatgtctgggtcagtacggaaagcgcgttggtcggttcgttgatgcggctggcacgccaagccgcgccgtcattacggaactggctgatgcgggcttcggcgagcaggtcggcctgcgggttggccttgcgcagcacggcgcacatgtcttgggcgatttcggcgagacgcttcagatcgcggcgatagtcctcgcgggcttcgcggtgcacccatgcgatggacgaccccggcagcacgtcatggaactggttgagcatcagggtcttccagatacggtccagctcttcgcgcggataggcgtagttcgggtcggccaacgtggcggccgcgcccaggtattcgaccgtgcgcagcagcgattcctcttggcggcagccgcgtttcatgccctgttgcgaggtcaaagtgccgcgatgcagttcgaggtacagctcgcccttccagacgggcatttccgggccggcgttctctgcaagctgccgatgcgccttgtcgaagaagtcgttcggctcttcgacgctcaccttggagacgccttcgaggttctcgtagcggtgcaagtgctccatcatgttgcgcgtggggccgccaccgccatcaccgaagccgaagagcagaagcgagcgatcggcgagatccttgtcctggaagttcttctcggcgtagtcgagttcctgaaccttgcaccaagcagcataggtatccgccggcgggaagtgggtgaagatgcgcgagccgtcgatgccttcccacatgaacgagtggtgcgggaacttggtggtgtcgttccacgagatcttctgcgtgaggaaccattcgtacccggcacggcgggcgatctgcggccatgcgccggtgtagccgaagctgtccggcagccatacgcccttgggctccacaccgagatgttccttgaagtatttgcggccatatgcaatctggcgaatcagtgattcaccggcgggcagcatgccatcggcttccacccacatgccaccgaccgggatgaaccggccttcttcaatgcgccgcttcatgcgcttgaagatgtccggatgatcctcttccagccaggcgtactgctgggcggagctcatcgcgtatttgaagtcggggtcggcgtccatcagcgccaatgcgttggatacggtgcgggccaccttgcggcgggtctcgcgcaccggccacagccatgcggagtcgatatgtgcgtggccgatggcgctgacgttcatggccgaggcgttggccggcttggccagtacgccggcgagtgctgcgcgcgcggcttccacggattcggggttgcgctcgtcgtaggcgttcagcgagcgctgcagcgctttggcgagttgccagtaacgcggcgactgtttgtcggcgaattccatcagggagctcaccacgtcgagatccacggagtagttctcgaaacgggcatcgaattcggtcagatcggcggacttgaatacgtacggctcgtccggcttgccggtggcatggtcgcccagttcggtctcaatgaacggaggcacgccgagcagcagcgggttgctggcggcttcgaggtacagggtgaagctgccgtcttcggcgaccggcacttgcgcgttgccctcggcatctatgaacggcacccaatagttgagcgggtgtacggctttgatggcggtgccgtcggcgcggtagacgaggccctcgatatggccgccgcaggagtgcgggtaccagccgaggtcgaggatgagctccagcggcttgcctttcgggtagccggccggcacggtaccggtcaggcggaaccagactgtgccccatgtggtgccccattcactgccgagcgtaaacggcttgaaatcgatgtcacctcgattgagcttcgcgaagaactcgtcagtgggcatcggctctccgggaatgtcaaaggactccaccgcgagctgtgcgatcgatgggtggatatgagggtccacgcgctggcgcactatgcgcttgcaccgctccagttgctgttcaggtttcaggaacatctgctgttcactccccttatctctgccgcttgtgcggccacatcattgtgctgcccgttcatgggaaacatatcgacatgcgccctcgcccgcaggagactaaagcgctttagtaacatattggagggaacgggatatgatgtcaaattactatcgcaattcagcgtgttccgtcaggcatgtcatgctcggtgtcgatgacgatggtcaccggcccgtcattgaccagtccgacccgcatatgcgcgccgaaacgaccttccttcaccggcactcccccggagcgcaacgcctcgttgaacttgatccacatgagatcggcatgctcgggcttgccggccttgatgaagctcgggcgattgcccttgtgcacgtcggcgaacaacgtgaactgcgagatggagagaatctcgccgccgatgtcctgaatcgaacggttcatcttgccctgcgcatcctcgaacaccctgagattcagaatcttatgggccaaccaggcgatctgcttgtcgccgtcctcatcggtgacgcccaccagaatcatgaatcccgggccaatctgctgcggctcgaacgtgggatccagcgtgcccaattcattgaccacgtccacggacgcttcggatactcgttgcaatacgactttcatggttccctacagtacaacgtgtgcagtcaccagccggtaacgtacgcgaccgactggcgaccggcaatatctgcactgcagttcatcgtttaccgcttcattcgacgacgagaccgatagtcatcacgaacaccaccaagaaagtccggcgcgttgaggtcctcaaggtcagcacctccgcgcacggcggtcgcggcacaggcaacggcctcaaacgaggctttgattccctgtccatcggcatgaaaatcagtggcgcatcgcggtgagataccaaaatcgccagccgtctgttcggcgtcgatgttcgcgcccagaaacacaaactcccaatgatagcgttcacgctcataggtaatcatctgcttgatctgatgcaacgaatatcgacgactcgcgttctcatacccgtcagtaatgatgacaaacagcacatgttgagcacggtacgctgccgcagtatgtcgttgcgtcacgatcatgcggtcaatggccagcccaatcgcacccaacaacgcagtgctaccgcgcacccagtaatcccggctcgtcaaatcgttcacttcgcggatgtcgaggtgattatgcaaggtttcgattcgatgatcgaacagtagggtcgttaccctgcactcgccggcaattgttcgctgcttggacagcatgctgttgaagccaccgatggtgtctgattccagacctcccatcgatccgcttctgtcgacgacgaacaccagttccgtacggccgttattgccattgtcgttcttgcccatgatggatcctttcgctcattcgccagccggattgtcggcgatatcaatgagcttcgcatcatgggaccagtcctaggtcgcttggcaagcgacaatatgccgcgtatcggcagcaggtcaggagacgagcgtaccgctccgcatcattgcccaagcaacggctgatcgtatcggaacaacatctcgttaatagtgaatacatcaaacatctcatggacgatgaagaattccacgatcacatcgaatttcacgctgtgcgacagcgcatacccggcgcacgccaatatatcttgcgtctcgtcaatattcagccgtaaggcaatggccagtgccagaacagttttcttgctgggcatatagccatcgccacagcgaattttagagaacagtttacgattgatattcgctcgtttatatacctccacgtcggaatatcctttggcgtcgataagcctcaagagaatgatgttaaaaggttcatccagattggagagcaccgcatcatccacatgcccggcggatttcggcgatggagctgccgacggcgccgagtagacaggcgtttcacccatatcgcccaggaaatccggcatgtccaagacgccggaaggtacggccctatccgccttcggcttattatccgagaaccgttggagagcaagcagctcatacgttctgcttcctagcgtatcttcatgctccgctacataataatcatcaatatatgcgcgaagacgtttgtcaatactgctgcttatttcgaaagcggttttgtcgaatacgcataggtatacgtcgagatcgtgtccggagtcggctgcgtcgcccaggaatcggcgaatctcatcgagggccacatgaagggcctcggctttcggatatccatagataccgctggaaatcaaggggaaggcgatgctggcacacccctgccgtgccgcgagttccatcgaattgcgatagcacgaacgcaacagacgttcttcatcatgcttgccgtctcgccatatcgggcctgcggtatgaatcacatagcgtgatggcaaattgaatcccggagtgataaccgcctcaccggtatgaatgggagcaaaccgatcgcaggcagcagccatgcgcgagactcccgcagcgcggaatatcgcgccgcacactcccccacccatggcgagctgcgtgtttgccgcattgactatggcgttcaccttcatcttcgtaatatcctgtcggaccaattccagcggcatatatcctccctgattacggcgtagcgtaatagcctctgcgcatcgtgcattcggcagccctgaactaagtctaaatcgtttcttccccgcaagttcgtccaactgacatatccgacacgagagaatagcgggaaaacaaggaatcaacggagcaataacagaaagccgctcagccttactttcgtaaagccaagcggcttgtttccgccgaggcggattggtggaggcgcggggaattgaaccccggtccgatgatcgagcccacagtcttctacgtgcgtagtctgctggccaagttggcgatttttctgcccccatcgatgtcgcagacaactgatggcgagcatatccgcagttaaagtcccgatgcagccctgaggctcaactgcatcagcaagtcttctaaacgacgctcagcatcctcccaaagacgaggaggagtgaacggagcggctgctcactggttaatcctgactaaaaatcaggcagcgagagcgaactcagtgcggttagatttagcacttattcttttgccggggtcatccacgagcggacccggcgttctcggcacgcttccctgcagcgaacaggtcaccgtcgaaaccgatcgcccccaatcttgagttatcaagcttccggcttttcggccggacttttcagcatacaccctatggcgctactcgcgcaaatcgccagcagcgaacatcgccccggaaccaacggaaccaacgaagccaacgaaatcgccgtcacttgatgatgggcttctgggatgaggaaacatcaatctgatgtttcccggcaaagccagccgtgccagcggtgatgttcttgtcgatttcctcgacttccgccaacttcagcttcagttgcgaggagtcgccccaaatgattacgcggtcaccgtcgttaagcgtggtagtcaccgaatcctgcgtctcagcggtgaccttggtaatggacttacgcatcgattccggcaacgcgcccagaatcgtcagcgcctccttcaccgaacggttcttgagactggcgtctatatccttgacctcgatcaccgggatgccatccacgttggcgttcttcaccgagttcaacacacgcgcctgggaatccaccgcggtcagggtatcgcctcttttcagcatggccgcgggccgttgcgccttgacttccacgctcatcgacttggggaactgtttggagaccttggcctcgctgacgccgggaatggacttgagttgctctgtgacctcatgggcggagaccaggaacaacgactttccagcctgcttatcggcgatgacatggatggtctgcgcactcacccattcgttggcaccggatacgccgatctcgctggtttccagacgaaacaccgacgagaaaagcagcagccacgttagccccgtcactacagccacactgacgaccgcaatcaacacgcgtaacgcaacgacgcgcacgtttgcacgcttgcgttctttggcgcgttcggtgaaattcaccactttcgggcgtgatgcgactcctagggagccggtggtctgatgcagcgtttcggcaacgtaatcctcgctgtgcaaccgtcgtgcatcgacgaaggcaccggcctggcccttggctaccgtcacatcgtcgatgatctccggctcgtcgatctcatgcccggaagacacggaccggggagtgcgagacttcgacgagcgacccgtgtttccgcgtgaaccgatggtgcgcggcttgcgggagctcccagacgaacgacgtgagccgttgtcattgcccccggatctgaccgtgcgcccggacatcactcgcagctttcccgatgggcctcaagtgcggtgagcagcacctgatccatgtcggtgatgtcgcccgcgcccacggtgaagatcacgtcgccgtggtgggcgcgcatggccatcatcttggcggccaggcacatatcctcgatcggctgaatccacgtgcctgcggaagcatccttgagtcccgcagccgcgtccacgatggtggaggggctgatgtccgggaaatcggcctgcttttcacgggccgggaagatgccggtgataatgacgtcatcggctttggccaaggatttggcgaactggtgcgcgaagaacttggtgcgggagaacaggtgtggctggaagatcacacgaacggtcgaatcggggtaccggcgtcgggccgcatccagcagggccgcgatttcggtgggatggtgggcgtaatcgtccactacagtgacctgcttgaccgtgccgcgcacctggaagcggcgtgccgcaccgaggaatgtgccggccgcattggccgcgtctgcggggctcacgcccagcagcacggcagcgctgatggcggcggccgcattgcgcgcattgtgcacgccaggaaccttcagggcaacgctctgagacaccggctcccccgccgtcaccgcggccggcagatgcagggtgagctgttcgacgccgctgcctgcggtctcgctttccgaagcgatccagacatacgcggcaccgcccaaatcgggcagggattcacgcgcggtagtgccgtaggcaacggtatgggatttcacgtcggcgggcagggcctccagcacggcaagtccgtcggggtcgtcgatactgatgatcacgtgaccggtggcccggccggcgtgggcaacgaacgcggcacggtagtgggcttcgtcgccgtaatggtcgagatgatcggcttcacagttggtgataatggcgatggtcggatggtatttggcgaagctgccgtccgattcgtcggcttcggccaccaggatgtcgcctttgcccgcgtgtccgccgtccagcgtggtgccgtccgggccttggataaagccgccgatggcgtagcttggatcggcaccggcgttcaccagaatgtgggacagcatggagctggtggtggttttgccgtgcgctccggccacggtgacggctcgtttgccgttcatgagcagggcgaggatgtcactgcgatgcacaatgcgcttgcccgccgcgtgtgctgcgacgatttccggattgtccggtttgatggcgctggagtagaccacggtctcggcctgggcgacattttcggctcgctgcccgaattcaacggtgatgcccagcgtttcgagtcggtcggttttggcgctgtgtgcgcgatcggagccgtccaccgcgactccttcggcgtgcagcatttcggccagaacgctcataccggcaccgccgataccgatgaaatgggtggcgccgagatccgcggggcgggccgcagcatcgaatgaggcatacgtggggtcaagcactatgggctgatcttgagacaattcaaaactcctttagggattccagcaccctatattatgaccgtatctcgtgctgcggaacggaattggtcagtatcgcgcacggaatgatatctgaatactacttggatggttcggctaattgcagaacgtgccgggccatgatttcggcagcgtttctgatgccgtattcccatgccttgcggccgaattcggcaagtcgttcgtgatcggcgagcagatcgggcacatgctcatgcacccactgcggggtcaggtccttgtctgcgaccagaaggccgccgccggcgttcaccactggctcggcgttgaaacgctgctcgccgttgccgatgggcagcggcacgtaaatggccggcaggcccagtgcagccagctcggataccgatccggctccggcacggcaaatcaccaagtcggcacaggcaaaggccagatcgattcgttccagatattcggcggtatggtagtcaccttgtccggccgattcggggccgatgccggtaagcacgtccgcgccggccgaggccgtgaccagttcgcgtacttcgctgattttgcctcgcccggtcaagtggatgatttgtgcgtggaccaacaggtctgcggcggaggaggcgatggcgcggttcaggctttgcgctcccagcgatccgccagtgaccagcaccagcggacggttcggatcgacgccaagctgcgcggccgattcacggcgtacggcggcacggtcgtcaccgatgcgtttggtcagggaggcgatggccgggcgcaacggcagaccgacgcgctcgacgtcggctccggcacgcggtttgagaccggtgccctcgtacacggtaccgatgaaatcggcccaacgagcgcccagtttattggccatgccggcacgcgcattctgctcatggatggcaatcggaatgcccatcttgtgtgcggtggcgtagacgggggcggaagcatacccgccgaatccggccacgacatccgcatgccgcgtttcaagaatggagcgcaccttggcggtttctcgcttccattttgccgggaagcgcagcatgtacaggttagggcgacgcgggaacggcactttttcgatggtgtcgagctcgtagccggcctccggcaccaaatccttctccaaacccaccgcagtgccgatgacggtgacctgtgccgtgggttcgatgtcgcgaatcgccccggcgaccgcgagcagcggattgacatgtccggcggtaccgccgccagcaagaacgatatgtggtgtgccttgattcatgattaccgagtctacttacgcgctctgacgcgactgttttatctgcggttgagagcgcataagtcccacaaccagtccggccgccgtcaagcacataatcatggatgagccgcctgcggagacgaacggcataggcacgcccaataccgggaacacacccacgaccacgccgatgttgaccatggcctggcccacgatccaaatggtgacgcacatcagcaccatggcaacataacgatcggtgacctgcaatgcgatgacgatcatgcaccaggcgagaatcgcgaagaacagcaatacgatggcgcaaccgacgaatccggtctcctcgccgatgatcgcgaaaatgaaatcgttatgggcggccggcaggtaattccatttctcccgcgaattgccgatgcccaatcccagaaaacctccggaggcgatggcgtacttggcgtgaatggactggtagcatacgctctgcgcgtcagcggccgagcaatcgccatatgtggccagaatacgacgcaagcggttcgggctggaaaccgccaatgcaccgaccataaccaccgcgcccaatacgccgactcccatccatttgccggggaacccgacgatcagaaaggccacacctccgatgaagaccagaatcatggccgtgccgaggtccctgccgcccatcaccagtgccacgcctatcgcatacaacaccaacggcgcggcatatgctttgattcccttcttgtggtacatcttgctgcaggcatgcaacgacgagggaagccatatgcacatcgcgaacttcatgaattcggccggctggatagtggtgaagccgaggtccagccaacctctgttgccgtagacgtcgtggcccaaaggagtaaaggtcagcgcctgcaacaggcaggcacccaccacaaagaacacgccggtccgtttccagaacgtcaccggcatcatcaatgccacgaagcccagcaccaagccgatcaggcaaaacgcgccctggttcagaagctgaaggaacggcgacttgcccagtgcggccatggtgaccgtggagctggagaacaccatgatcaggccgaagcatgtcagccccaccacggccatgcggaagccgtggtagcaccatagcgggttgagcaagcttcgccaacccgtgtagtcggcgatttcgagtgagggcttgtcaggggctctgtatgccttacgcttatgggtatcagtggaggccatgcacctcgctccacgtcttggctgcggcggcgaatcgattgcctcgatccgcataggacttgaactggtccatggaggcgcaggccggagccataagcacgatgtcgccggcggcggcatacgtgccgcaggcttcgacggcacggtccatgacggtatcgttgtcttcgggatcgatgatggtcaccgggatgtccggagcttggctggcaaacgcttcgatcatcggctgctggtctttgccgatgatgacggccgctttgatggtgtgtgcctggtccttgaccaggtcctcgaatcgactgcccttggccagacctccggcaatccagatcacagacttggccgggaagctggacagcgaggcgcgtgccgcatggccgttggtggctttggaatcgtccacaaaacgaacagagccgccctcgactgcggcctcagccacggtttcgatgcgatggccgcccggcttgaacgaggtaagcgccttcaacgcggtatcgcgatcagcgccaagtcccagcaccaacgccaatgccgtcaatgcatcggccaccagatgcgggtacagtgagccgtccggctctgccagatgcgtgaaatcggtgatggcggccagtctgaccgactctcctactgcgccgccggccacgccgctcctgtccacgatccagccatcttcaatgccgatctggccggcttgaggggcctcgagcgtgaatcccaccttgcggcatccttcggcagtctgagcctcggccgccagttcgctgactttggcgtcctgcgcattgtagacgatggcgcgtttggcgttgtggaacaccttggatttgtcggcggcgtaattctcgcgcccgccatgccagtcgaggtgatcgtcggcgatattggtgatcgccgcgcagtcaagtgccagcgaatcggtgaagtgcaattggaaggagctcagttccacgcacagtacgtcgtgctgcggattggtggcgcaacgagacaggctcatgctcatgtctccggaggcgatattgccggcggtcggcgcgtcgagtccgcaggcggtgagcatttccgaggtcatctcggtggtggaggttttgccgttggtgccggtgatgccgatccatggagccggagtaccggtgcgctcgttattcacacgcagctgccatgcgaattccacctcgctcatcacggggatgccacggcgttgggcttccagcacgaacggggtgcgggggttgaacaccggggacgacatgacgtagtccacgtggtcccagtccacgtcatcaaaggagtggagatcggcctcgggcttcctctcgtcgacgccaatcacgtgggcgccgcgttccctcaatacctccgccaacgaggtgccggacacccccagtccggcaatcaccactgtcttatccgctacttgcattgttcctcctgatataggaattccgtgggtgagcataatccacccagatttccgctagctgaacagcaggccggagcgggtgacccagtcgccgtagaaaatcgtcagggcgagcagcacgaagatgagttcgatcatccagaaccgcaccaccaccttggtttcggtccaacccttcagttcgaaatgatggtgaatcggcgccattttgaatacacgtttgtgggtcatcttgaagtacccgacctggatgacgtcgctcatggcttccatgacgtacagtccgcccagaaccaccgccaggaattcggtgtgcgtggcgatggacagggctgcgaacagaccgcccaaggccagggaaccggtatcacccatgaaaatcgatgcggggttcgagttgtaccacaggaagccgaagcaggcgacggccgcgcatacggcgatgacggtcagatcgagaggatcggacacggcataggaatatccgccatggctgccgcccttgatgtggtagctttcccagaatgcgatgacgccaaaaccagtgaaggcgatcatcgacgaacctgccgccagaccgtcaagtccatccgtcagattcactgcgttggtccatgcggtcatcaggaagttcacccagatgacgaacaggatgatggctacggcacggccggcgaagccgaagttgaagaacggctgttcgatgaagctgatgcctgcctgcgcactggggaatcccgatttggtgggaatcagcagcgcaagtaccgcgtagatggtggcgaagatgaactggccaatgaacttgccgcccaccgataggccttcgttctgcttcttacgcaccttggcgaagtcgtcgataaagcccagcagacccatcgacagcatggcgaacagtacgagcgccgcggaccaggagggcacgtcgcccgaacgcaggtatcggtacagtgcggaggatgcccaaccgagcagaatcgcgaagttgatgaccacgccgcccaacgtgggggtgccgcgcttgaccagatgcgactgcggcccatcctggcggatgtactggccatagtgcagcttgtggaccagccgaatcagcagcggggtgccgactaaggtgacgatgagcgacaccagcattccaatgatcagagcaatcacgtgcagcttctctttcttgtcggtttcttggggtggttatcaggtcagttctttgcccagcgttcagccaaagcgctcaggcctgacgcgtgcgatcccttgagcagtaccacagcgtcgggatggttgcgagccaagtcgatgaccagctgttcggccgcatcgatgtcgtgtacgcaatccaccgacgcggattggctctgacgggcaccgtccgccagagcctgtgccagtgcatcgagatgttggtcttgggcggaaccgaccgcgatgatcgcgtcgatgcccaattcgtccgcatacgtgccgatcgaggtgtgcaatgccgtttcatcggcgccgagttccagcatggcacccagcagcgccacgcggaacggctccttgccgtcatttgagttccaggccttcaacccgttcaggccggctttcatggagtcgggattggcgttgaaggaatcatcgatcagcgtgaaggaagtcccctcgcgattcaccgtggacaatgccatgcgatgagggctgatggtgtgctgcgaggccagaatccgtgccaccgtttcgggtgccataccgtaacgcatcgccacggttgcggcggccaacgcgttcatcacattgtgacgtccaggaatgcccagatgcaccggcgtatggttgccgtccgcatcgaccaacgtgaattcagcatgatcggaccggtcggcagtgacatcaatggcccgcacctcgggctcctgcgacgatcccaagccgaaccacagcacgtcgccgttggccaggccggccatgggaaccacgtgttcgtcatcggcgttcagtaccgcggtgcctccgggaagcaatccctgcacgatttcgcttttcgcctgtgcgatgcgttcgcgggagccgaattctccaaggtgagcgacgccgaccttcaatacgattgccgtgttcggcggtgcgatacgggtcagtcgcgcgatttcgccgatatggctggcacccatctcagccacgaagaaccgggtgtgctcatcgacccgcaacgcagtgagcggcaggccgatctcattgttgaacgatcccaccggagccacggtcggtcctacggtggcaagcagggaggagagcagatccttggtggtggtcttgcccaccgaaccggtcaatccgatgatgtcgaagtcgccgtccagctcgcggcggcgaacgatgttgtatcgggcgagttcgccaagggcgtcgaccgtgtctttcactacgatctgcggaaggccatcggacttcacctcatggtcgacgatggccaccgtggctccctgtccagcggttttcgccacaaagtcatgcccatcgacacgctcgcctcggatggccacaaacaccgatccggggccggcctgccgcgagtcgctgaccgtattggtggctcgagactcggaaccggcgtctccgatcaatcgaccatcgacggccttggcgatctcctccacgctcatcggaaccatggtgtttcaaactcctttacgattacgcttcgtcccgtatccacggacttaattgagattattggccacatgcagggcactgcgtatgttgtttttcctcacgccggcggccagcaccatggcgatggccaaggacatgtgcccgagtcggacgcggtcatacattgccggtgaatccgcagccatttcatccgattcgggtgtcgacgaggtcatggacatgtcatgttccgcaacgaatgcgtagcgtgtcttcaattcgttcaagcttgcgcttgcgttgacatcctccgtgcccagtacatccacgttcaccgattccaacgcatgctcggccaacgtgcggtcatccatggcgatgatcacggccgccacaccgtcttcggcgcacacggacagcgcgcgctgcatatcgaggatgcccagaggatagttcaggttcatggtacgtgtcatcgacgtggacccggatgcggtgattaccgccaccggattgcccagcatgtgcaggaattcggagagctgggacacgcctgcgtcgacggcctgctcatccgcaccggtcaccgcgaacaccgccatggcattggacggtccgccggccagaccgctggccagatcgccgagtacgcgatcgtcgaaatcgccgtagagcaacggtatatcggcattggcgatctgccctttggacgcgcgtggcagcaacgccgcataggcaccggcctgtgcggcatgcagtacatcgggttcctgctcatgcgtgcagatgaacagcgagccgggaatcacggtgtccacggcatcgctgagtgaggtaatggtgacattggtggcgaagggtggatcgacttcaaaaccgtaccgttcgaccagcattcccagggtcacccgctgggcgatggattcgctcactgcactcatgggctatcgcctttctcccctgatccttaccacgtgactggaatagcatttttgcgtggactggagacaggcacctcgtatttctgcataaggaactcacaaatctgtgcggaaacagggccggccgtcagaccgccgaacacaccattcggatccttcatcaccacggtgaccgcatagcgcgggttgtccgcgggaatcaccacggaataatcggagataatggacgagagcgtgccatccgagccctgcacctctgcggtaccggacttggcggccatgcggtaaccatcgaccttgacgaacttgttgtagccttccgccactgattccatcgcattcatcatgtccgatgcgaccttttcatccaccacgcgggtggcttcgccattcttgatctcagtggtcttgccattggcatcggtggttgatttgatgatcgactgctgctgcttgacacctttgttcgcgatggtggccaccacgttgttgagctgcagtgcattgacggtgtagccctgaccaaacaggatggtgttgcgcgtacgcagatcccatgccgaagggctggtgagcagaccgctcgattcaccgggcaggttcagtccggtcggttgtccgatgccgaatttggtcaggtactcgtagcgttgctcatccggatagttctccccggccataatcatgccgacgttcgatgagttctgcagaatgccggcgagcgtccagcgctcagtgccatggtcgaatgagtccttgtaggtctggccctcctgtgtaatgtggtccgggaccgacaattgatcgctcatcttatgcagtcccatctgcagatagccggacatggagatgaccttgcccaccgaaccaggctcgaaggtttcggacacggcccgagacgggctcatcttcgccgcatcggtaccagcctgtacttcatcgctatcggccagtgcgagaatctccccgctctggacatcctgcaccacggcgatcgcccacgctgcaccatacttggattcggcctccttcaagacctttttgacataccattgcacatcacggtcaatggtcagggtgacatcgtcgccatttttggccgccaccgattcggtcatggtgccgggaatctcttcgccgccattaccacgctggtaggtttcatggccatcggttccggtaagcgtcttgttctcgacccgctcgatgccggcgacgccatcgccgttgtcgttcacgccgccaagcagcgcgcccatgagatcgccatccgcatacagtctttcactgctcagctcaccccagacaataccgcccaggtgcaacgcctcgatgctgcgcttgacctgcggagtcacatctttcttcagaatcacatactgcccggtaccggacagatcagcgcccagttccatggcgttcatatccaggactttggccagcagtcggcccacggccgccgctccggtagcgcccacgggtttgccgtcaatttcgtggcagtaatcacgggtgttgtcattgcaagtaatcggctcgaactcctgtgcagcctccggattggcgacgatagtataacgctccacgctttgagcgagcacggagccgttgacgtcgaggatacgcccacgtttggcgctcaacgtcacggtcagggtgcggttagccgtggccgcttgtgcggtttgacggccgccgatgagctgggtggaggccagctgaatcacgcatgccgacgccaccaacgccaatgcggcgccgatggcgatgcatttgaacgcgaaggtcttgaccttggcgaactctacgatgcgacgaatggtgttcactgggttccgcctttgttggactggtatccgcttaagtcgatggacactgatccctgctgcgggaccatgcccatgtcgctggccttgtcgggcaggttcgcgaccaattgatcgagtttggcctgatcgtcttcgatatcttgggtaagtctgttgatgttggtttcgatctgtgccgcctcaaacgagttctgcaccatctgggtacgcagcatcagcgcgccgaacaaggtgccgacgaggaagatcactgcaatggccacgtgcaccagcggtgcgcttcttgttctggtccattcgatgacccgtccgacgacattgccctgctcgtttccacgcgggttggagaccacccgcagctcaggtcgggaggaggactgatgcttggtgtgcggtcggttcgaggctggagccgcgttcgatcgaatgctacgtgcagttgccatatgctgttatcccctccttgtacgaattcgtgccgtgtttttggctctgcccggagacgcggagccttgtatcttgacgtcattcaggccctgcgcggtttgcgtaaagcgtttcctccatcgtgacggaatctcacggctgacttccaccgcccgcaaccgcaccgaagccgatctcgggttggctgcgatttcatgttcgtcggccttgacggcacctcgcgtgagatccgtgaaaaacggttgggcatccggcggtatgacaggcaggccagccggaacatccactcgcagcccttgtgccatgaacgatttgacggttttgtcttcgagcgaatgataggactccaccaccagtcgtcccccgacatgcagtcggttcgcggcctgcggcaatgtggaggcgagcttgtccaattcgccgttgacttcaatgcgcaacgcctggaagacgcgtttggcgggattgcccgccgggcggtgggcttgcggcaccacttcatcgaccagacggttgagctgtgcggtggtggtaaacggctccttgtctcgacgcgccacgatggcgcgggcgatctgacgcgagaaacgctcttcaccgtattccttgaatatgcggaccagttccgccgcatcataggtggcaagaatccgttcggccgtcaacggctggctgacgtccatgcgcatatccagcggcgcatcatgcgaataggagaagccacgatcggtttcgtcgatctgcaggctggataatcccagatccatgaatacggcgtccacgcgttcgatgtcttggtccgccaacacctgatcgagctgatcgaaggcggcatgcaccggaatgaatcgatcggcgagcccctcccgttccatacgttcggtggccagccccagcgcttcactgtcacggtcaatgccgatgagccgagcctgaggcgcggccttgaggaaggcgatggaatggccggcaaggcccagggtgcaatccactgcgatggcgttctcatgttccagggcaggtgccatcaggttcacgcaatcgtcaagcaataccggcagatgaatattcgccacatcaaccatcagaattccacctccggcaacacatcgtcagcaatatcggaatatccctcttccttctcggcgaggtaggactcccacgtgtccttattccacagttcggcacgggtgccaacgccgatcaccacgacgtcggaacccagattggcgtaatcgcgcagcatctgcggcaccagcacgcggccctgcttgtccggctgctggtcgacggcaccggaaaggaacacacgcaggtattcgcgggcggctttgtttcccaccgacacacgctgaatctgcgaggcgatacgtcgaaattcgtcgaacggcagcaggtacacgcaccgttcctggcctcgggccatgaccaggccctgccccagctgggagcggaatttggccggaagcgccatacggcccttggcatcgatcttcggcgtatatgtgccgagaagcaatggcggcagaccagccatgagatcggccatagtggtggagccttgtgcgttggcatcagcgtcgcgaatcgtctgatcggcaaccatggctccacctccttcatcgttacgtgggatacacttcggccaactggctcaccactctaccccacgattccccatttctccccactcatgcacgatttgctcacccttttagggcaattaccgatggattgcgcgtgtcggccacgactgtcgcacgaatggacgctccgcacatccaatccacgtcgcgcaccccaccgaccgagcagcatggtgaattcacgctgaattcacctattccgagttgtccgcatcactgacgtagggggtgtgcggtaaatttgaatgccttaagtttttctgccccacggaaatggaacgaagagaacagcatgtcgagttacgcctcccagctgcatgaagagcagcaggccgtcgatcgcgcctatggacgattggatgatctgcgagccgaaatgtggcaacgcctggacaccgtacgcgccgccggctcccacggatcccccacgcaacgcagcgaacgagactcctttgccacaatgtacgaaaaccgcctcacgcaattgcgcagcgttgaggatcggctggtgtttggccgcctcgatgccaagaacggcgaccgtcattacatcggccgcatcggcctgtcgagcccggaccatgagccgattctgaccgactggcgtgccgaagccgcacgtcctttctatgaggcgaccccttccaatcacggcgacatcgtgatgcgcaggcatatcaccttgagtttccgcgaagtcgtgggcgttgaggatgaggtgcttgacgtgcattcagaccaggtcggccaggcgtcttccgccggcacattgaccggcgagggtgcgctgctggcttcgttgagctcacgccgcaccggcaagatgaccgatatcgtggccaccattcaggccgagcaggaccgcatcatccgctccgacatgaatcgcgccgtggtggtgcagggcggccccggcaccggcaagacggccgtggcgctccatcgcgccgcctacctgctgtacacgcaccggcgcacgctggaacgttccggcgtgctggttgttggccccagctcggcgttcctgcactacatcgatcaggtgctaccctccttgggcgagaccggcgtggtctcacgcaccatcagcgatctgattcccggcatcaccgccacggcggtcgactccccttatgcagccaagctcaagggcgatcgacgcatgacctccgtagtggccaatgccatcgccgcacgcgtgcgtgttcccgctgctctgccgacagtaaccattagcggcattcaggtaccaatgctggccactgatatcgagcaggcgcaggcggacgcgaagcgcacccgacaacctcataacaaggcccgcgagacctttatccgttcgatgctgaccagcatgcagaaccgttatgccgaacagcttgattacacgccggatcaggcggagctgaaccgcgcgatgtcgctgctacgtatgaacgagcaggttcgcaagaccctgaacctgtgctggctgccgatgaccgccccatggctcatcgatcagctgttcgcccatcccgaacgtctgaagtctctggctggttggctgaccgacaacgacatcgcggcacttgcccgccccaaaggctccccgttgacccgctccgatattccgctgctcgacgaagcaatggatatgctgggccccgatcccaaggcggtggcccgccagtccgccgccgacgcacgtcgtgccgccgaagagcagtatgccaaagacactctggccgcgaccggtctgggtggaggcatcgtctccagtcagatgctgctcgaccagatgaacggggacgacgctgagctgaccgcgcagcgggccgcggccgaccgtgaatggacctacgggcacatcgtggtcgatgaagcgcaggaattgaccgccatggactggcgtatgttgatccgccgttgcccctcccgctcgttcaccatcgtgggcgatgtggcgcagacttcggcgctgggtggcacccgacgctggagcaaatcgatgaaccgcctgttcggcgaaagccactgggatttgaacgagttgaccatcaactaccgtaatccgcaggaagtttccgaacttgcctcacgatttgccgaggaggaaggcctctacatctccacggtcaatgcggtgcgcaccatccccgattcggtgtcccgcaatgtggtgcccgacatgtcgtccttgctggaaacgacggccgagcaggcggcgcagcttgccgaacaattcgtttcggcagacggcaccggccgcatcgccgtcatctgtccggataatctcatcgccccggtgcgcgatgccgtgcgccgcaaactggctgtcattcttgacccggccgaatacgcaaggctcatcgagcagcccgaatgggatgagcaaatcagcgtctgcggcactgaaacggtcaagggtctggagttcgatgccgtcgtggtggtcgagcccggtctcatcgaggatgacgcgccgagccgcctggtcgccgcctcggacctgtacgtggcaatgaccaggccgacccagaaactggttatagttcggacaaaagcggacgaaaagtccctgaacatctaaggtatgaagcatgcccaaagcactgttattggaaaacattcaccccgatgcggccaaatcgctgcgtgatcacggtttcgaagtcgagaccatgaagggagccctgagcgaggacgaactcatcgatgcgctggatggcgtggacttggtgggcgtacgctccaagaccaacgtcacagcccgcgtgctggatgcgcgtcctacgctaagcgccatcggctgcttctgcatcggcaccaatcaggtcgatctggcacatgccggcaagcgtggcatcgccgtgttcaacgctccctactccaacacccgttccgtggtggaattggtgatctgcgacatcatctgcttgatgcgccgcattcccgcacacacgcatcacatcaagcatggcctgtgggacaagtccgcttccggctcgcatgaagtgcgaggcaagaccctcggcatcatcggctacggcaacatcggctcccagctgtcggtactggccgaggccctcggcatgcgcgtggtgttctacgacattgaggagaaactggcactgggcaatgcccaccgttgcgacaccctcaacgaactgctggaacagtccgatgccgtgaccctgcacgtggatggccgcaagtcgaacaccggattcttcggcgaagaccaattcgcccacatgaagcaggacgcgattttcattaacctttcgcgcggtttcgtcgccgatctgggagctctgaagcagcacctcgattccggccatctgtctggcgcggcggtcgacgtgttccccgttgaaccgaagaagagcggagatccgttcgagacctcactggccaatgaagacaatatgattctgactcctcatattggcggctccaccttggaagctcaggaatccatcggccatttcgtctctcagcgtcttgaggattactggttcaagggttctacctccttgtccgtgaacctaccacagatcaacctcggtgagtgcaagggtgtgtgccgtatcacccatctgcacgacaatcttcctggtgtgctggctcatgtcaatcatgtgctcggcgaggagaacatcaacgtttccttccagtcgctggcaaccgaaggcgaacttggctatgtggtcaccgacgtggctcagacgcccagcgccgccacgcttgaagcactgcgcaacatcgaaggcaccattcgcatgcgtgtcatcagctgacgcagctcatcctcgattgatacgaaaaagacccgtcgtcatgacgggtctctttcataagtgctgggcttcatgattggctcgcaccatggtttgcgaatcactcgcatatcacggtgcatggcattcgcatattattcacgcaaaccatcaatggcgctttggaaatcctccagacctgcaaagttctggtacacactcgcgaatcgaaggtacgccaccacatccaagtcacgcaacggtttcaggatggctttgcccacttcatctgaggtgacttcggcaaggcctcgggagcgaagatcctcttcgactttctgtcccagcagcttcagatcctcttctctgaccggccgcccctgacaagctttgcgtacaccggaaatcactttgtctctactgaatggctccacgccacccgaacgtttagtgaccagcagcatactggtttccaccgtggtaaaacgcttgctgcatttcgggcatacgcgacgccgacggatggaatgaccgtcatcgctaatgcgcgtatcaatgactttggtgtcggggttctggcaaaaaggacaatgcatgctccccagaataacgtgtacgggcggaaaaaccatgccgctcgggtttcatttactcaaccggaacaataatgcgctgcccggcctgcaatgatccggactcaagattgttcaacgcaatcagctcatccaccgtttccgatacatcatgaccagcaggcgtgatagccgaagcatatgaccagagcgtatcccccggccgcacgatataaccggtcacctgcgtggcccccgtatccgattgggcccgctgaacggtaagcgcgccgaaaccacaccaggccagcgccaaggcgaccatcactgcgataatcttcccacgcacattccggcgggacgttccagcatgctgcatagctacacgtgcactacaggccggggccatcaccattgaaccagtcatcacgaccacctctctcgaacagatgttctatcgaacaactgttcttataatggcacaaacgttcgacacggtcaagtcaaaactcgaacagatgtttgatttcacacgaacaacacgttatgctggtgacataacgaaaggagccctgacgtgagcaccattcccttctcccccaagcagaagccggacgagtccaccctgaccgaccgccagcgcaaagtgttggacgccattcgcacgcatatcgacgaacaaggcttcgctccctctttccgggaaatcggaaatgccgccgggctcaaaagtccgtcttcggtcaagcatcagctacaagttttggaagacaagggcttcatccgcatgaacgcgaacaagggtcgagccatcgaggtggtggcaggatccgccccgaatgccgaaaagccctcccaagccagcgaagaggcaaccagcaccagtaatgtggcggagatataccaattccccgccgaagccattgccgaatcacacgatgtgccgctcgttggccgtattgccgccggcgtgccaattaccgccgaacagcatgtggacgacgtcatgcgtctgccggaacggctgaccggctccggcaccctgttcatgctggaagtccacggcgattccatggtggatgccgctatctgcgatggcgactatgtggtggtgcgcgaacagaattccgccgtcaacggagatatcgtcgccgctctgctggatgacgaggccacggtgaagaccttccgcaaggaaaacggccatgtctggctgatgccacacaaccccgcatactcgcccatcgacggcacacatgccacgattatgggcaaggtagtcaccgtgctgcgcaaattgtagcctgttcgccaccagctgatcagcgtgcaccgaatcgcgccggtcgtgctatagtcacgcacagcttacggaaccccggcctcgcgccggggtttcgtcgtattcagaccatatcgcaaatggtattgagaagcggtttcaactcgatagagcgaaggagtacatatggctcatacccatgcacccgcaccatccacatccataaaccctgccgcgcaccagcgtaggctgattgccacgttgaccgtaaccggttcggtcttcctcatcgaaatggtgtcggctgtcttaaccggctcattggccctgctggtggatgccggtcatatgctcaccgacatgtccgtgctggcggcatccacaatcaccgccatactgatgcgccgcaagcccagcaacactcgtacttggggctgggccaggcttgaggtgctcaccgctgccgcaggtgccgtggtgctgctcgtcgttggcatctatgcgttgatggaggccggcatgcgtctgttcggcggttccaaagcggaaatcgacgatatcggcttgctgctgttcgtgggcattctgggtcttgccgcaaatatcatctcgattttcatccttgcctcgcagcgcgaagacaacatgaatatgaaggccgcgttcctcgaggtgatgaatgacgcacttggctcggtggccgtggtggcctctgccctggtaatgatctccaccggatggaatggcttcgacgccgtggccggtgccgtcatcgcactgatgatgattccgcgcgccatcaagttgctgcacaacgcggtcaaggtgctgctggaggaaacaccggatggacttgacctcgataaggtacgcgaacatctggaagacgtgccgcatgtgcttgccgtgcatgacctccacgccagcacggtgtccaccggcatgccgattctgatggcccacgtggtagttgacaaagacctcaccatggaagatgccgccacaatcctcacccaactgcaggattgcctgcgcgagcacttcccggtctcggtcccccacaccaccttccagctcgagcccgagggctatagctccccctcctccaacgaactccacgaataaaaaatgctcccaacgggagcattcagcagggtataaaaaatcgctgtacgtgtgcgattttcgtgccgcacaagttgaaggcctacaaaggtaggtcgagtcttgtgcggtgcgaaaggcgctccgtacagcgattttttatcagaagccgaactgggcggcggtttccttcagcgtctcggcagagcgcttcagagcggcgagctccttgtcggagaccggggtgttgatggtgttgttgacgccctgacggttgaggagggtcggcacggacatgcagatgtcggagatgccgtggaagtccttgagcatggagctcacgggcaggatgcggttggtgtcgtgcaggacggcttcgatgatgtcgacgccggacatgccgatggcgtagttggtggcacccttaccgttgatgatcttgtaagcggcgttcttgacttcctggtggatctcctcgcgcttgtcggcgtcgagcggatcgtggccgggcagcggggtccagtcgcacatggggacgccaccgatggtggcggactcccacagcgggacttcggagtcgccgtgctcgccggcgatgtaggcgtgcacgttcttgacgttgacgccggtctgctgggcaatcaggaagcgcagacgagcggagtccaggttggtgccggaaccgaagatctggttctcgggcagaccggtgagcttctgagccacgtgggtagcgatgtcgaccgggttggtgatgagcatgtagatggcgttcggagccaccttgaccaggttcggcatgatggccttgaggatgttgacggtagcgccaacgagctcaagacgagactgacccggcttctgacgcggaccagcggtgatgacgaccatgtcggcgtcgcggcagatctcaggatcgtcggaaccgtcgatggacacggtcgggtagaagctggagccatgctgcatgtcgagcacttcggcttccacgcgctccttggcgatgtcttcaagcacgatctcgcgagcgatgccacgctgggcagcggcgaaggcgagggtggagccaacggcaccggcaccaataacagcaagcttcgtgggcttaacggtagtttccgccatgatggatgaacctctcttcaaaggcggtctgctgatgaatggcaggccttgtaactaacgtcttcactctataaacccgctaagacgttttgctaccagcacaccaccctgtttgataaccgtatggtaatgttttcaacggttgttagcgctcacgaatatactgtgatgtttatcacgttagtcaatggactgttcgaccacctgagcggcaagatgggcgtcaacgtccgcttcaagctgtatgccatcatcgcggtactccaccttgtctaccttgccgtattcgcgtacacgagagatcagggagccagcggtatacggcagcagagcgttgacatgcacatgcgggaccggcagcagactttcgaccgcggtacgcagctcgtccaatccctcaccggtataggcggagacgatgaacgcatctggctgcagcgcggcgagtcgttcacgagtcgcctcgtccgcctgatcggccttgttgaatacgagaatacgcggaatcgaggccgtgccttcgatgtccgccaacacgtcattgaccgcgtcgacctgagagaacgggtcagggtgggagccatcgaccacatgcaggatcacgtcggcctcggccacctcttccagggtggatttgaacgcctcgaccagctgggtgggcaggcggcgcacgaagccgaccgtgtccacgtaggcgtaagcgcgtccgtcgcgggttttggcgcggcgcacggccgtgtccaatgtggcgaacagcgcgttttccaccagttcggccgaaccggtcagacggttggtcaacgaggatttgccggcgttcgtgtagccgaccacggccactgtgggcaggccgaagcgacggcgtgaaccgcgcttgacctcacgtgccggggccatctcacgaatctgacggcgcagtctggcgatacgcgtgcgaattacacgacggtccatttcgattttggtctcgcccgggcctcgcgatccgatgcccgcatccgcgccggccgcgcgaccgccggcctgacgggacagcgaaccaccccaaccacgcagtcggggcagcatgtattcgagctgcgccaactccacctgcgccttaccttcacgcgaggtggcgtgctgggcgaagatgtccagaatcaccgcggtgcgatccaccaccttgactttggcggcgtcctccaatgcacggcgctgtgacggcggcaggtcgtcgtccacgataatcgtatcggcttcctcacgcgccacgatgtcggcaatctccttggctttgccggaaccaacgtacgtggctgcatccggcttggagcgatgctgcagcaaaccatcgcataccaccgcaccggcggtttcggcgagcgccgccaactctctcaatgattcctcggccttggcttgcgtggtgacggcggacgaccagacgccgacgagcaccacacgttccagacgcaccttgcggtattcgacttcggtgacgtcctgcagctcgccgagaccggcgacatgcttgagctcgttgcgggcctcgcgctcctcccattcctggttggcgtcctcatgccagccggtcgcgcgctggctgtcgtcgagcagcacttcggactgctcggccagcacaccttcaggggtaacgtcgttgttgccgcggttgatgtcggtgtactgggtgttgtcggtcaagtgcgcctcgtttggttggaatggttcacgattcttctatggtcctttattatcatcacatgaggtgacatgctggcatagatcggcacgtaccggcataggccggctgatacaggtcggcatacgagagcggcgaatcccgcagaaatggagcgaccatggcagaacagtatttctctgcggaacccgcatcgaaggatgtgcgccgcacattgaacgtaacgttgcgcggccatgaggcgaccgctcaggtgtcgaacggcgtgttctccggctcgcgcgtggacctcggtacgtcggtattgctgaagcatgcgcccgagccgccgcttaccggtgattttctggatttgggctgcggctggggccctatcgccctgacattggcgtttgagtcgcccgaagcgaacgtgtgggcggtggatgtcaacgagcgcgcgctggacctgacccatgccaacgcacaggcgaacggccacacgaacattcatacggctcaggtggacgagtccagcactcccctgcctgccgagaaccagccggcgttctgcgagacggtgccgagcgacctcacgtttgatgtgatttggtcgaacccaccgatccgagtcggcaaggaagcgctgcatacattgcttatggcttggctgccgaagctcaaggtgggcggtgccgcctatctcgtagtgcagaagaatctcggttccgattcgctgatcccctggctggacgatgcgctcggcgaggggttcactgcgagcaaatacgcgagctccaagggcttccgtatcattgaagttcgtcatgaaatatgagtatcccgcagaacttcccgtatctgccgcgcgtgatgagatagccagcgcggtcaaacgttcccaagtcgttattgtgtccggccagaccggttcgggcaaaaccacacagctgccgaaaatcctgcttgagcttggccgtggcacgcacggcaagcagatcgtgcacacccagcctcgccgtatcgccgcacgcacggtggccgaacgtatcgcctcggagatgggcgtgaagctcggtgacgaggtcggctatcaggtgcgtttcaccgacgaaagctcgtccggcacacgattgagggtcgtgaccgacggtattctgctcgcccagatccagcgcgatccgaaactcacccgatacgatacgatcatcatcgacgaggcgcatgagcgcagtcttaacatcgactttctgctcggctatctgacggcactgctgcctcagcgccgcgatctgaagctcatcattacctccgcgaccatcgattcggtcaagttccaggagcatttcgagcacgccttgcatgagaaggtgccggtaatcgaggtttccggccgcaccttccccgtgcaggtggtctacgagccgcttggcaccgcgcccgcgttgatgcgcgaagtgccgggattcgcggtgggcgcccgccccggcgacgccgattacgacgagctggccagcgccatcgcggaatccgattccgaccggccccgcggccggtccggtgcctcctatgccgatgacggtatcaccgatatgcctaccgccgtggctcgagcctgcgccgagctggtgattcactcctcccacgagcgcggtccccgcgatattctggtcttcgcctccggcgagcgcgacatccacgagttcgaggccgcactgcggcatcattacggcccgcgcgccgacgacatgcgccggccggatgccatcgagatcatgccgctgttcgcgcgactgtccgccgccgaccagcataaggtgtttgaatcgcaccttcaccagcgcatcgtcattgccaccaatgtggctgagacctcgctgaccgtgcccggtatccggtatgtggtggaccccggttccgcccgtatctcccggtattcgaagaccgcaaaggtccagcgtctgccgatcgagccgatcagccaggccagtgccgaccagaggtccggccgatgcggccgcgtggccgacggtatcgcgatccgcctgtattcgcgtgaggattacgagacccgaccgcgcttcaccgagccggaaatcctgcgtacctcgctgggtgccgtggtactccacatgctgtcggtgggagtggcccgcacggccgaggacgtcacgaacttcgggttcatcgatccgccggatatgaaggccgtgtcggacggtttcaatgagctcaccgagctcaaggccatcggccgcaagcgcggcgaggtgacgctcacccataccggccgtcagctggcgcgcatccccatcgacgtgcgtctgggacgtatggttatcgaggccgcgaaaaccggttcgccgaatcttctggcccaggtgctcgtggtcgtggcgttcctgagcttgcaggacccacgtgaacgcccggacgaaaagcgtgaggatgccgaccgcatccacaaccggtatgcggatgagacctccgacttcctgacggccctgaatatctgggatcgcgtgttccaagcagacggcgatccgagcaacaacgcgctgcgccgtatctgcaaaaccgagtatttcagctggctgaggatgcgccagtggaaagatctcgtctcccagctacgccagatgtgcaaggagctgaagttcaaggtcggcgacccgctgcccacctcccgcccaggcttggagatccgccagctgccgttgaatcagcaggccgcgcattcgctgtgctgcgcgtgggatgcggatggcatccacaagtcgatgctcgccggattgctgtcgatgatgggcatgcaggtggtgcgcgagcccaaggcctccgatttcgcggggctgaccggttcggcgcgcgcccgtgcgatgaaacgcgcccagaagcagtcgaagaacgattatcagggcgcacgcggcacccgtttcgccctgttccccgcttccgccgtggccaagaagaccccgtcatgggtgatgagcaccgaactggtggaaacctctcgcctgtgggcccgctattcggcggccatcgaccccgcgtgggccgaaccgttggccggccaattgacccgcaccacgtatgcggagccgcactggtcgggttcgcgtggctcggctgtggccaccgcgcgcgtgctgctgtatggtctgccgatcgtacaggaccgtgccgtgcagtggggacgcatcaatccacttgaggcgcgcgacttcctgattcgccagggtctggtcgagggcgatattcagcagcgtttcagttacgacgacttcgtgggcaaaaaccgcgacattctcgaggatgccgccgatgatgcgagccgcacccgccagctggcggataccgtgtccgacgaggatctgttcgacttctacaacgcggtcattcccaacgatgtgaccagcgtggccgatctggcgaaatggtggaagtccgagcatgaccgccagccgaatctgcttgatttcgacccggccaaggtggagcgtctggcatccagcgattcggtgagcctggacgattaccccgaccattggcatacgaccggatcggacggccaacccatcgacctgcgtctgagctacgtgtacgatccggccgacccggccgacggcgtcaccgtgcatgtgccgttgaaggcgctctcgcgtatcacgcccgaccagttcacatggaatgtgccgggtctgttggatgagctgatcctgtcgatgatcaaggcgctgcccaagcagctgcgcgtccagttcgtgccggccccggatgccgcgcgtgcgattcgtgactggatcgacgagcattacccggatctgccgggctcgggctcgcagcagaagccgaatctgccgccggtggatgaggatggcacgaccgttggctggcccgatctggcacatgtgttcaccaaggcggccatcgccaccaagggtgcgcagattcatcccgaagtgttggggccggaactggtcgagcgtctttccccgtatctcagggtcacgttctcggtggagcagcaactgccggccggcaagcaccctcgtggacgccggcatgcgcgcggccccatcaaggtgctgggtgtgtccaaggatctgaaggcgctgcaacgcaagttcgcctcgcaggcggaggcgtcggcccgtcaaatggtcaagaagcaggccgatcaggctggagaacagggcaagctggtcagtcaggcgaacctgttgcataaggcgggtgccaccaccgagtcccgggccacgatgctctggcgtggcgcattggatgcgctgcggttgccggccgaacgcatttcgtcgcgctggctgggtaccgaggcgttgatgctggcttctgctccgtacaagtccaccaaggatctggtcgaagacctgcagctggccacggtcaaacggctgatgccgaatgtcgacaggctctcggacgatgaggcgttggccaatgcggtgctcgatgtgcgcgaagtgtacgaggacaccgtctatcaggtggcgcatgacgtgatcgccgtgctcaaggcttatgccgaggtcgacaaggccactggcggcaaggctgatctgccgatgctttcggtgttgcagtcgattcgcgaccatatcgccacgctcgtctaccccggattcatcgggcgcactcccccggatgcgctgaagtcgttgagccgatatttgagagccgatctgagccgactcaataaggcgaaaaccgataagaaccgtgacgtcaagtgggcttggcaggccgacgaggcccgtcaggtggtagataaggcgttggcccgtgccaaggcggagccggccggcccgaagcatgaggcattgatgaagcaggccgaacaggcccgttggatgcttgaagagttctacgtgtccctatgggcgcaggagcttggcaccaaggggccggcttcgctcaaccgtatcaagaaagcgctggcgtgaccggacggcaaacaagtcgccaggccacgcgccagcgcacgcgcaagccgtcatcacagcgtgggcaagtgcgcggacgcctcggcaatcggaacaggaaacgcaatcgtaggcacggtccgatcaatgctctgaagcgttcctggcgtaaggcgaactggccgacccgtatcaagatggtgctgattcccacggtggcggtggtcgttgtcgtagcgctggtggccgggctggttcgtttcacaaactggcgggcacaggttcgcgcagccgaggcggcacagctggaactgacgcgaacatacgatttcaatccgggcaatattatttcggatggtcagttcttcaacggttcggcgatgagtcaggccgaagtccaatcgtttttggacacacaaggcggctcgctggccgcgatgaccttcgacacatcgaacgagtcaggcgaaggcctgtgcgcggactatacaggcaccaagggcgagtcggcggcggcaatcatcgaccagtcggcccgcgcctgcaaggtgagccagaaagtactgctcaccatgatgcagaaggagcagcatctggtcacggccgtcgatcccagcgactatcagcttatggcggcgatggggttgaactgtccggataccgccgactgcgatcccgcctatgccggattctttcggcaggtgtatggcgcggccaagcggtaccgttactatctcgagcacgaggaacagtacgggtatacggcgcacaatctcaactacatccaatatcatccgaacgcggcatgcggcggcgcacaagtgtatatcgagaacaaggcgaccgccctgctctacatctatacgccctaccagccgaacatcgccgcactggccgccggcaacggtaccggcgattcctgctccagttatggcaaccgcaacttcgcgcttatctacaccagctggttcggttcgccgcgaagctgataacggcagctgaccggtcttgtccgattggactcggccaacactgtcagcgttcgacgtatggacgcagcagggtcgtggtgccaaccgccagcagcgaggcgaaagccagcaggcacaggcagacggcctgcacgcagtagatcggtcgaatgtgggtcagcggttccacgccatgacctttgtcggccagcttgccgccgtacaggttgctccacagacaggcgcagccgtagatcaccaaaccgacgctgatatatcgttcgggcacgccgatttcgtcgcgcatgatcggcgagagatacgtgtagaagacataggaggcggctgcgccgaagaccacatccgccacgccgagctggatgcggcggtcgaagaacagacggaattgcctcaggaaaccaatcttcgccggatgcgagttgcgtggcagagacactgccatcgatgccatcagcacggcagtgagcaccgagaccaaggcaaaggtgacacgccaaccaaaggtatcggccacccaagtgtcggccggtgcgcgcggtgttcgcaggtgcgttcgtcatgggtgctttcttgagtgctctcgctcgtactacaagctgattcgtcggttatgtcaatcgttttttcgtatcaactcagcgacaacgttattcccacctctgcccgctacccaccaccacgacacgccatagaaaaccccgccgatgaccaatcatcgacgggattcggcacatgtgcaacgcttgcgattacagcttcggcagatacttcttcagctcgtaaggcgtgacctgctggttgtactcctcccattcctggtgcttgttgtccaggaagtagccgaaggcgtgttcgccgagcacgtcggccacgaagtcggatttctccatgatcttcagcgcctcgtccagcgagcgcggcagcggctgaatgcccatagcctgacgttcgccgtcggtgagctcccacacgtcatcactggtaggctcgcccaactgcatctgcttatcgataccgtcgagaccggcggccagcagcaccgagtaggcaaggtatgggttggccaccgggtcgagcgcacggaactccatgcgcgcggagttgcccttgcccggcttgtactgcgggatacgcagcagcgcggaacggttgttgtggccccagcagatgtagcttggtgcctcgttaccgccccacaggcgcttgtacgagttgacgtactggtcggtgaccgcgcagatttcggccgcatggtacaggatgccggcggcgaactggcgggcggtcagggacatgttgaactcctgaccggcctcgtagaaggcgttggaatcgccttcgaacaggctcaggtgcgtgtgcatgccggaaccgggcgcgtcggccaggggcttgggcatgaagctggcgtgaatgccacgctccaaggaaatctccttgaccaccgtacggaatgtcatgatgttgtcggccatggtgagcgcgtccgcgtatcgcagatcgatctcgttctggcctggccccgcctcatggtgcgagtattccaccgagatgcccatttgctcgagcatgttcacggtggcgcggcggaagtccatgcctgggctgcgcggcacgtggtcgaagtagccgccctcgtcgatcggggtcggggccttggaccagtcgtcctggctttcgaacaggtagaactcgatttccggatgcacgtagaacgtgaagcccttgtccttggctttggcgagcgtgcgcttcaacacgtgacgtggatcgccgagcgaaggctcgccgtccggggtcagaatgtcgcagaacatgcgggcggtaccttgcgggccaccgcgccacggcaggatctggaacgtcgagggatcgggttgaacgatcatatcgtcttcggacacgcgggtcatgccctcgatggcggaaccgtcgaagccgagaccctcctcaaacgcggcttccagttcggccggagcaatcgccacggacttcagtgttcccaacacgtccgtgaaccacagacgaataaagcgcacgtcgcgttcttcgaccgtgcgcagcgcaaactcctgctgtttatccatagtcgcctatcgttccataaccgtgttacgaagggcgttaacatctcactgttcgtcacctgcgagtcgcgagatttcatcaacatgccccggtccgcatgtcaggcatggttcaggcccatgccggcacggcactatggtagtgactatgagcgaagatcatctcacaccatccgccaatccgcccgtcgacgtgaccagctggacacaggccaccgacccgcgcgaccgttcgcgcgccggcatcgccactcgtaccaaggcgccgctggacgcacatgccatctggaaggtcaaggagggccggcgtgaggcgatcagccttttggaggagcagtccgcgattcgcgtaccggatctgattccgctgcgttacaagcgtatgagcgccagccccttcaccttctaccggggcaccgtgctcatcatgaccaatgacctggcttccacgccagtcactggcattccggtgcagtgcgtgggcgacgcgcatatcggcaatttcggcattttccgctccccttccgcccgtctggtgttcgatatcaatgatttcgacgaaaccgctatcggcccgtgggaatgggatctgaaacgtctcgccgcctcggtggagatctgcggacgcgccaacaaaatcaaggagaaggaccgtcgcgccgccgtggtccagtgcgtacacacgtaccgcacacgcatgaagtggttctccgaaatggattaccttgacgcgtggtacgagcacctggacgtggaggagacgctcgaccgcttcgagaccaccggttccaaacgcagccgtgtgctgcgtgaggcggccatgaaggcgctgctgaaggataacgacgcggcggcggccaaactgtgccgttatgagagcggcaagctcaggttcaaatccaatccgcccgagctggtgccgatcaatcagctggatgattacgccgacttggatgcgttgcaggcacgtatagacacgctgttcgagagctaccggcattccctgtacgacgatcgccgttgggtgttcgatcatttgcgctatcaggacgcggcccgcaaggtggtgggcgtgggctcggtgggccagcgcgcgtggacgtcggtgtggatcgcgcgtgatatcgacgatccgatgatgattcagatgaaggaggccacgtattccgtgctcgagcattactgcggcgcgtcgccgtacgccacgcacggtgagcgcgtggttcaggggcagaagctgattcagaatacggccgatgtgctgttgggttggtcgagctttatggccgaggatggccgaccgcgcgactattacgtgcgccagttgtggaatggcaaggggtcgattgatatcgacaatctcaacgcttcgggattgagcgatctgtcacgcatgtgcgcatggtcgttggcgcacgcccacgcccgcaccggcgattcgattgcgatcgccaattacatgggtggcaccgacgaattcgatcaggccatcgcctcattcgccgtcagctacgccgaacagaatgatgaagactacgccgtcttcaaaaagctcctcaaatccggcgacctcccttgctgagccgttaagcggacagcccaatgggctgtccgtaggaggggtctgagtgaagcgatagctgagcgaaggtagattaacagtctcgctaaggcgagtcctttgcctacttcgctacttcaagcgcttcctggagcgtgaacgcacgtgcatagagggacttgccgaggatggcagaatcaacaccaatttcagccagttccttgatggcgcgcaaatcgtccagcttggagataccaccggaagccgtgaccttggcgtcggtgcgttcagcgacttcactcagcaattgaatgttcgggccggacatcatgccgtccttagccacgtcggttaccacgtaacgcgagcagcccacggagtcaaggaacttcatggtctcaaacaggtcgccgccttcgcgcgtccagccgcgcgccgccagtgtgtgaccgcgcacatccagaccaacagccacgcggtcgccgtacttcttgatgaccgaggcggtccaatccggattctccaaagcggcggtgccgatgttcactcgggcggcaccggcctcaagggccgcgtccaacgaagcgtcatcgcgcacgccgccggacagttcgatgttcacgcggtcgccgagctcatgaacgatttctcgcagctgatcgcgattgttgcccgtaccgaaagcggcatcaaggtcgaccaggtgaatccattcggcaccggcctcaacccaagtacgggcggcctcgaacggcgaaccgtaatcggtttcggaaccggattcgccttggcgcaggcgcacggccttgccatcgcgtacatcgacggcgggcagcagagtcaacgacataagaagagcctttcttcagttacatatacacaatttgagctccctcgtcagagggagcttcatgcttttttacagcgtggcgatccagttcttgaggagctgggagccagcgtccccggacttttccgggtggaattgcgtggcggacagcgggccgtgttcgtaggcggccacaaagcgcgatcggccgtacgagcaccagctcacgcgttcgggcgaatcgctcagatcgatgtcgaagcgggacgtatccgccggcttcacttccatcgcggcgtaggagtgcacgaagtagaaccgttcgttctccacaccgttgagcagcaccgaatcgggggcggcctcgatcgtgtcccatcccatgtgaggcaccacgtcggcgtccagcaggttcaccgaaccgccgatcagtccgatgcctgcggcatgggcaccgtgctccagaccgtgttcgaacatgatctgctcgcccacgcacacgccgagcaccgggcggccagcgcggatgcgatcatagatcacacggtcgccgtcgaccttcttcagtccttccatacatgcggcgaacgcacccacgcccggcacgactaggccgtcggcctccaacgactgccggtagtcggaggtgagggtggtgtcgacgccaagattggcgagcgcacgcaccatggaacgtacattgccgaaaccgtaatcgaaaacaaccgctgtggtcatctgctctcctatcccctactggtttggttggcgtctattcgatgcgggagccgcgcccgccacgtccgcgcctagtgtggttggcgagaatctgcatcgcctgatcatggtcgagtccagcggaatccaccacttcgaacccttgggtcttgagttgattcagggttacgatgccgagcatcaggtcctcgacgaagcgcggcgtggaggtgaacagcacgggcggcgcgaaactctggccggcctctccctgcacgtacatggccacttcaagcttgtcggcacggttgactgcaagaatcacggccatgccggataccacggtggtcaggtccttggctgcggcttccgggccgtcgccgttcagattcttcagcaccgcgacggccccctgattggcaccgatgcatgcggcggagatgtccgacagctggcagaacgcggccaacagttcggcggaggcaagacgggtaacgatcagcgccaccttcgccttgttacccaacagtccagcgagttcgttgtcgaagccgagcgaggggtcgaccacgtcggccatggcctcgttcaccgcatccgcaacggacccggtgacgtcgtcggtcataggctggccggaatcagcggaagccttatcagccgtatcatcattcgcgtcggaatcggacttcgctgaagcagcgtccgctgttttatcggcatcactggtatcactggcatcgccggataccgaatcgtccgcgaattctttctcgaatccggcgagcgcagcctcaagctcctcgtcggagaagtgcgattcgtccggatcgaacttgtcgtcggccatcacagggctcccttggtgctgggcacgccgtctacacgcgggtcgatttccacggcgaagcgcagcgcacgggccagcgccttgaattcggcttcagcgatgtggtgcgggtcgcggccggcgagcacctgcatgtgcaggcagatgccggcgtggaaggcgatggattccaagacgtggcggaccagcgagccggtgaagtggccgccgatcatgcagaattcgtagccttcgggctcgccgctgcacacgcagtacgggcggccggaaatgtcgaccacggccttggccagcgcctcgtcgagcggcacggtggcgtcggcgaagcggcggatgcctttcttgtcgccgagagcctgcttcagagcttcaccgaacacgatggccgtatcttccacagtgtggtgcacgtcgatgtcggtgtcgccgtgggcgtggatggtcaggtcgatcagcgaatgcttgccgagcgcggtcatcatatggttgtagaacggcacggatgtatcgatatcggttttgccggtgccgtcgaggttcagttcgaggtcgatgtgtgattcgctggtttcgcggacgatgtgcgcggttcttgccatcatgtctcctgtgtgattcgtcatattggattgcggcgggactcgaatcgcttcgggtctcgccgcaatcggaaagaaacgtcccttatgctgcttccactatacgaagcacttcaacaagggcgttacggaaggtttccatctcctcgtcggtgcccatgcacacgcgcagccaaccgtccggtccgaccacgcggatgagtacgccgcgcttcaggagctcgtcgaagatggcttcacgcttgtcgaagtgcccgccgaacagcaggaagttcgagccggattcggccacttcaagcggctggtccttgtaggtctgttccttgagccatgcggcggtggcctcgcgggtttcgcgcaggtgctcgacacggctcagctgctcgtcggtgtgttcgaaggcggccagtgcggcggcctgagtcacggcggacaggtggtacggcatacgtacgatacgcacgcagtcgatgatgcccttggacgcggccaggtagccgactcgcgcaccggcgaaggcgaaggccttgctcatggtgcggctgacggccaagttcgggtgatccttgatcaggctcacggcgctcggggtgccgggcttgcggaattccacgtacgcttcgtcgatgacgagaatcgggtgcacgccctcgcccgcgccgaccacttcagcggtttcgcaggcggcgagaatacgttcgatatcctccatcggcaacggggtgccggtcgggttgtttgggctagtgagcagcaccatcgagggcttgacctcggcgatggcctcaagcaccttgtcgacgttcagcgtgaagtcggcgttgcggtgggcgagcttccaaccggtgaaggtgtcgcgggcgtactccgggtacatggagtacgtcgggtcggcaccgagtgcggtgcggcccgggccaccgaaagcctggaacagctggagcatgatctcgttggagccgttggcaccccacagctcgtccacgtccagacgggtaccggattcgcgggccaggtaatcggagaatgcctgacgcaattcgatgtgctcacggtccgggtatcggttgagtgtgggggcgatttcacgcacacgcttggcgatggtgtcgcatacggccgggtccggcgcatacgggttctcgttgacgttcaggcacaccggcacgtccagctggggagcgccgtacggctcctcaccgatcaggtcgttgcgcagcggcaggtttgcgggaatcgagctcatcgcagaccggcttccttctcctgctcgcgcagggtggccttgtcatacggatccttgacgaagcgggagagcacgcactcgccgtgggcgggcaggtcctcggataccgcgaaggcgttgatgcgggcggcgagggccttgaggccttcctcgtcgtattcgatgacttcgaccggcttcatgaaggtgtgcacgccgaggcctgcggcgaagcgggcggtgccgccggtgggcagcacgtggttggagccggacatgtagtcgcccagcggcaccggggagtacggaccgcggaagatggcaccggcgttcttgatgcgcttgacgaccgcaccggcatccttggtctgaatctcaaggtgttcggcggcgtaggcgttggccgcgtcgatggactggtcgagaccgtcggtcagcacgatggcagactgggtgccggacagcgacgtgtggacacgctcggcgtgctcggtacgcggcacgcggtacttgaggctctcctgcaccttgtcggcaatctcggtggagtcggtgaacagcacggaaccggcgagctcatcgtgctcggcctggccgatgaggtcggcggccagcaggctcgggttggcggtttcgtcggcgatgatgccgatttcggtggggccggcaaccgcgtcaatgcccacgaatgcggagaccagcgacttggcggtggccacgaagatgttgcccgggccggtgatcttgtcaaccggatcgcacaggatgtcgccgtcctgcggctcgctgcccttggcgccgtatgcgaacatggcaatggcctgagcgccgccgaccgcgtatacctcgtcaacaccgaggatggcgcaggtggcgaggatggtcttgttcggcaggccttcctcattgtcgcgggcgggcggggtggcgatggccagcgattcgacgccggcggcctgggccggcacagcgttcatgatgacggagctcgggtagacggccttgccgccgggcacatacaggccgacgcgctgaatcggaatccagcgttcggccacgcgggcgccttcggcgaggtcggtgtagaagtccttcggcacctggttggcggccacggcgcgggcgcggcgcaccgattcctcgatggcggcgcgcacttcggggtcgagcgtggtcagggcgtccttgatcgcctcgaccggcacgcgcaggttcttgggacgcacatgatcgaacttctcctcgaagtcgcgcagggcagcggcgccgcgttctttgacatcgtccagaatcggacgcaccaaatcggtggcttcggaagtacccattgcagcacgcggcatcgcggcgagcagttcggcacgggacaggttctgaccacgcaggtcaatgattcgcatgatgttctcactcataaagccccatcgtaccaatgtgcgaggcctaagcggcgaggaacgcccatgttcacccgtatcgtgagattatcgtgcgtgatgtgggttcgtgatgcaggttattgacgcacgccaaatgcccgagcggtctcatcgataatcggcatgtcatgcacggcgacgtgactcacttcggaccatcgcgggccaatggctaattgctcaaccaaggcttgcactgcgtcgctgctaccttgtgcctccagctcaaccgagccatcgcgacaattacgcacccacccctgtacaccaagccgacgtgcctgagtcaccgtaaaataacggaatcccacgccttgcaccagtccggtgaccactatatgtttgcggaccaaattcgccgattgcctcatgatgctaagtccctaatccatcgttcgcagcattgggtagaggctcaggaatcgccggtatgcgtcggcatatgtgcgtgcggtgtcaggattcggctggtatacagtgcattcgcatactgattgcagcaggtctggtacattgaataccaacgaggccattgccactgctggcagaatatcggcattggcgaacacttcaataggatgctccaacacatcggccagaatctggcaccacgcattttctctggctccgccgccaatcagggaaatctcggtgggtttggcgtcaaaactttccataccttgacgaatggagaaggccacaccctcaagcgcggcacgcatcatgtctgccttggtggtgtctggatcgaggcctacataggccccgcgaatattcgggttcattacggggaatcgctcccccaccagatatggcaggcatagcacaccgttggagccgggtttggatgtttcgataagctgatgcgcctctgcgtaatcgccatcggcgaatacgccggtaacccatttatgcacgtcgccggcgttgaggaatggcacggcattcacgaagccttcttccacaccaaatgccagattcgcagcacctggcttgtcggtgaacggctcgggcgaaacggtggcgatccagcctgaggtgccgatattgatgttgtattgaccaaggtggctgacaccgctggcaagtgtggtggcacccgcgtctccaatgcccgcgtataccgcagttccggcggaaaaaccggtgcgttgtgcagcggattccgtcactgtgccaatgttgtcttgcggattgtgcaggtgtggcaatatggtcatgtcgatttctgcgacctcgcataattcggcatcccactggccattacggatattcatggccccagctgtggaacacgccgccacatcgcccacgcattcgccagttaattgggcgatcaagtagtccttggaactgatcaatacatgacgaatgcgcgcgtacgtttccggctcgtgttcacgcagccacatcaacttgggcaacggcaagcagccttcgagccggttaccaacggtgttcaggaaacgttctgcaccgccctgatatgtctcggcgagttgcttggcctgttcctcggctcggccatccgaatacagaatggcattgcggacgggattgagctcgccgttcaaaacaataacatcctgcatctgaccgctgaaaatgatgccacgaatgcgagtcacattgaattctgactcggattgccgcgcctgctcaatcatgtgcctggaggccgagcagagagcttgccaccattgatcggggctctgctcccgatagtcgccgttgataataaggtcaagttcgctactcgcactagctacaatgcaaccctgcccattaactaaggcacccttcaacgccgtggtccccgcatcaaatgcagccacatattccgtagtcatatcgttcatcgtagcgctgaaaaaaagaagcattctttgccagcaaaacgcggcttattgcatcgtcttgtttctagaatgggaaattgaacgaatactacgactagtgaggcattatggcaattcaatcgacaatcatgctgaacaacggcactgtcatcccgcaggtgggcttgggcgtattccagacaccggatggtgatactacagtgaacgcggtgcagacggctctggagaatggctaccgccatatcgataccgcaatgatttaccacaacgaggcttcagtgggtgaaggtattcgccgtgctggtgtgccgcgcagcgatttcttcttgaccaccaagctgtggaatgacgatattcgcgcacgccgcggcaaggatgcattccaagaaagcctcgaccgcttgggcgtggattatgtggatctgtatctgattcactggccggcagacggctggcagcaggcatgggacgacttgcaggagatttatgcctccggccgcgccaaggccattggcgtcagcaacttccaaaagcatcatatcgatgagctactgacccatagcgatgtggtgcctgctgtagaccaggttgagtcttccccacaattcaccaatcaagagcttattggccagctgcgtgccaagggcattcacactgaagcttggagtccgctcggcggcaccggcggtaacctactcagcaacccagtactggccggaatcggtgccaagtacggcaggtctgctgcacaggtagtgattcgttggcacatccagcgcggcatcgtcgtgcttcccaagtccactcatgccgagcgcatcaagcagaacttcgaggtcttcgacttcaacctatcggtcgatgatatgaccgccatctccgccatcaacaccggcaagcgcaacggtgctgatccggacaatttcaatttctagacctttatcggtccagatacgcaaagagggaactctccgtcattggagggttccctcttctatatgctttcgattcggccacaccctaggtgcgagagcctatgtcttgtcggtgtcttgtcttgttggtttcgggtatgcgaaagccccttggggcgtgtgctccgaggggcttcctgtacgtgtggtgcggcggcgtgctactctcccacaccctgtcgggtgcagtaccatcgccgtgccaggccttagcttccgggttcggaatgggaccgggcgtctcacctgggccatggccgccgcaaatcttctcttgtacggtcagacgctggggtctgccggcctgtggcggcctgggaaccggacagcggacgcggatatgtcgatgtttcgtcttgtggccagacaatgctcattgccgtctggtgccgtttgcaggaggaagatgcggtccaaccggggaatgtcagtgttgcctttcgtccgttagtaccggtcggctccacccctcgcggggcttccacgtccggcctatcgaccacgtgttctgcatggggactacaggaactcgaaggttccacggaatgcttatcttggagcaggcttcccgcttagatgctttcagcggttatcccttccgaacgtagccaaccggccgtgccactggcgtgacaaccggcataccagaggttcgtccacccaggtcctctcgtactatgggcaggcctcctcagcattccaacgagcgcagaggatagagaccaaactgtctcacgacgttctgaacccagctcgcgtgccgctttaatcggcgaacagccgaacccttgggacctgctccagccccaggatgcgacgagccgacatcgaggtgccaaaccatcccgtcgatatggactcttgggaatgatcagcctgttatccccggggtaccttttatccgttgagcgatgccgcgtccgtacaccggcaccggatcactagtcccgactttcgtccctgctcggaccgtcgtcctcgcagtcaagcccgcttgtgcacttgcactcgccacccgattgccaaccgggctgagcggacctttgggcgcctccgttactctttgggaggcaaccgccccagttaaactacccgccaggcactgtccctgaacaggatgactgttcgaggttagacatccaatgcgaacagagcggtatttcaccttacggctccgcgcgatctggcgaccgcgcctctcggcctcccgcctatgctacacaatccacaccgaatgccaataccaaggtatagtaaaggtcccggggtcttttcgtccttctgcgcttaacgagcatctttactcgtactgcaatttcgccgagctcctggtcgagacagtggggaagtcgttacgccattcgtgcaggtcggaacttacccgacaaggaatttcgctaccttaggatggttatagttaccaccgccgtttaccggggcttgaattcaccgcttcacccgaaggctgacggatcctcttaaccttccggcaccgggcaggcgtcagtgcatatacagcggcttgcgccttcgcatgcacctgtgtttttggtaaacagtcgctaccccctggtctgtgccacccccaaaagctccccgcgcgaggcggttcaccatcgggggtctcccttaaaccgaaggaacgggagtgatttgccgagttccttgaccaggattcgctcgatcgctttggtattctctacctgaccaccagtgtcggtttggggtacgggcggcttcgagcctgacgccgaagcttttctcggcagccgggatcaccggatatcgggccataaggcccccatcatcgcacctcggacccatgcgggacggatttgcctgtcccacgccctgcgtgcttgaccacggaagaccacctccgcggccggctacccttctgcgtcactcctgcgctgacctactacaaggatcggtcccaacaggccagggcatcccgcccccgaaggagcagtaagcccggacccggaggttagtactccaagcctcggttttggcggctgaaagccggtacgggaatatcgacccgttcatccattcgactacgcctgtcggcctcgccttaggacccgactcacccagggacgatgaacgtggccctggaacccttggtcatccagcggacgggatcttcacccgtctctcgctactcatgtctgcattctcactcccatgaagtccacggcgcgttcacacggccgcttcgcccctcatgggacgctctcctacccagtacaaaatactgccgcgtcttcggtggtgtgcttgagccccgctacattgtcggcgcggaaccactagaccagtgagctgttacgcactctttcaagggtggctgcttctgagccaacctcctggctgtctatgcgactccacatcctttcccacttagcacacgcttcgggaccttagacgacggtctgggctgtttccctttcgacgacgaagcttatcccccgccgactcactgccgggatacgcgtcaccggtattcggagtttggttgctgttggtacccgatacgggcccgcaagcatccagtagctctacccccgggacgtaatgacccgacgctgcacccaaatgcatttcggagagaaccagctatcacggaatttgattggcctttcacccctagccccaagtcatccccccggttttcaacccaggtgggttcggtcctccacgcggtcttacccgcgcttcaacctgctcagggctagatcatcccgcttcgggtccaggacacgcgactcaaacgccttttaagactcgccttcgctacgcataccccacacgggttatgctcgccacatgccactgactcgcagactcatttttcgataggcacgccgtcaccccacaaaagggctccgacggattgtaggcgcacggtttcagagactgtttcactcccctcccggggtacttttcacctttccctcacggtactcgttcgctatcggtcagacaggaatattcaggcttacccaacggtctgggcggattcgcacggggttccacgggacccgtgctacttgggagacgcgatcggcagaccatgcgcgttcaggtacggggccctcaccctctgcggcccggtattcaacccggttcccctgacacatggttttctgcaactgccggccggcccgtcggagccggcgcacgcgatcccgcaacaccccgcgcgcaacccccgacgggtatcacacgcgcaaggtttggccatcatccgctttcgctcgccactactcacggaatatcctttcctgcaggtactgagatgtttcacttccctgcgtaccccccggccgaagccggtaccgacccatgacggtcggtgggttcccccattcggaaatcctcggatcaaagccctgttggcggctccccgaggcatatcgcagcctcaaacgtccttcatcggtcctgtctgccaaggcatccaccatacgcccttgcaagcaacacacaccacgaaagtgcatggccgcaagattcctctagcaaattcccagacgacaaatcatcacactaaaaatgatcacaaaacgatcgaaacgaacaatagagttcgattcgaaatcaacagcaaaacaaagattcaaaaacccttgttttgctcgcgtccactatccagttctcaagccaccacgcaccgccacgccatcgcgccggcacacggccggcccccaggcacgacgggcatcgaatcgcgccaggcaaaaagcctggggtggcgatccgggagcccaaaagcgcatccgcaccaccccggcacccaccgcacgaccggcggggcaaagccaacgacgtcttccacaccagcaaccccgccgccatcgcaccatgcgacgcgcggggcgcacaccgtcggacgaacatccgactgaattctccgtagaaaggaggtgatccagccgcaccttccggtacggctaccttgttacgacttagtcccaatcacgagcctcaccttagacggctccatcccacaaggggttaggccaccggcttcgggtgctgcccactttcatgacttgacgggcggtgtgtacaaggcccgggaacgcattcaccgcgacgttgctgattcgcgattactagcgactccgccttcacgcagtcgagttgcagactgcgatccgaactgagaccggttttcagggatccgctccgcgtcgccgcgtcgcatcccgttgtaccggccattgtagcatgcgtgaagccctggacgtaaggggcatgatgatctgacgtcatccccaccttcctccgagttaaccccggcggtcccccgtgagttcccggcataatccgctggcaacacggggcgagggttgcgctcgttgcgggacttaacccaacatctcacgacacgagctgacgacgaccatgcaccacctgtgaacccgccccgaagggaagccgtatctctacgaccgtcgggaacatgtcaagcccaggtaaggttcttcgcgttgcatcgaattaatccgcatgctccgccgcttgtgcgggcccccgtcaatttctttgagttttagccttgcggccgtactccccaggcgggatgcttaacgcgttagctccgacacggaacccgtggaacgggccccacatccagcatccaccgtttacggcgtggactaccagggtatctaatcctgttcgctccccacgctttcgctcctcagcgtcagtaacggcccagagacctgccttcgccattggtgttcttcccgatatctacacattccaccgttacaccgggaattccagtctcccctaccgcactcaagcccgcccgtacccggcgcggatccaccgttaagcgatggactttcacaccggacgcgacgaaccgcctacgagccctttacgcccaataattccggataacgcttgcaccctacgtattaccgcggctgctggcacgtagttagccggtgcttattcaacgggtaaactcactctcgcttgctccccgataaaagaggtttacaacccgaaggcctccatccctcacgcggcgtcgctgcatcaggcttgcgcccattgtgcaatattccccactgctgcctcccgtaggagtctgggccgtatctcagtcccaatgtggccggtcgccctctcaggccggctacccgtcgaagccacggtgggccgttaccccgccgtcaagctgataggacgcgaccccatcccataccgcgaaagctttcccagaagaccatgcgatcaactggagcatccggcattaccacccgtttccaggagctattccggtgtatggggcaggtcggtcacgcattactcacccgttcgccactctcaccaccaggcaaagcccggtggatcccgttcgacttgcatgtgttaagcacgccgccagcgttcatcctgagccagaatcgaaccctccacaaaaaaacttcatgaaaagcatccgaatagatgactctcaaaacaaaaattgacgagcacgtccttaaggaaggacgccctcaaaaaacctcacccctcatcaaaccctcccgggtacccaaccaccacgacaggcaatcaggcgaggaatgaactggcaatcattgactataaagaagtagtacaaacacgctcttgagttctcaaaccaccaccactcacccacctcgcggccctccggaaggagaaccactcgccgagcggcagcaagggaataacttacacgcattcgcggactcacgcaaaccgggcacgaaaaaacacgccagaatcgttgaaacgacagcgttccatcggcgtgtcgaaatcagcttgaatcacgccgttaccatcaggatacgccggctctttatgggctcacgtaacgaaatcagatgttcaccggcgtgtcgcaacaatttattccacgttcaactcccctcagtccgatcacgcggacggctcacccgcaattacggacgagcaaagctcgcacccttatggctcgactatcgtctcgccttcgtctaaaaaacagtccaccggactgttttttagacgcctcagcatcaaagaggggagccaaagggggattagaaggtcaggcgcatctgatgccagaccacgtcaccgtgagtggactccgaaatgccctcgtcctcatacccaaattgcgcatagaatccgaccagccgatctttgcaggtgagcaccaagcctttacgtccagctgcacgagtgtcttcaatgactttcctcatgagtgtactggcgcaaccgcgatgctgatacttcggcgcagtatccacgccgaaaatcatttgccagtcaccttgagggttgtgctgcgcggcatcctcgtacatgtcatcggtcaagtcgcgccgatcggtcgcgaaaccgttgatgaacgccatgacgatctcgccatcaatcaatagccagaaacattccggataggtctcgattcgggcgcgcagggacgagcggtcggcggcctcggcggccgggaagcattcggattccatggcggccagcgcgtccagatcgtcgatggtggcgtggcggattaactggggatcagaatcagtcatgtttttgtctttctcttaacactccgttgtgagcaccccccccagtcacgcttcgcgtgccagtcgaggggagccagatggatgtcagattacgcggtattcgcgtaacagggtggcaatatcggtgccgtcgagtttcttgagcaccttcttgaccacggccttttcaatgaagttgagcttcatatcggtgaccggtgcaccgtcacgcaatttgacggtggcgttgagcaggttgcgcacgtcatagacgctaccccacacttcaggcacgccgcggtccacgccgagcaacgtgtagacagcttccataccggtgcgcatcgagtattcggtggtgaaaatcgtgtcgcgcggggtctcggcgaactggccaaggaatgcgaagttcacggcaccatcgggcaccacgtccgggcggtcgccggccgcgcgcggcatgaagaacgcggtgatgtacggcatcatgaccggcacggtgttggcgtggtgctttgcgagcgcctcgatcttgtcggtcggcacgcccatgtggtaaagccactcctcgcaaatctcttcaccggtgcattcggtcatcggcttcttcacatagttgccgggcttgtccgggaacaggccgtagacccatacgcacagctggtccttgggctggtcgcggaactgctgctggcggttcagggtccaactcatgagccagttggagtcctgcacggtgacgatgccgccggtgacgaccttgccggagaacgggtcacgcttgcagatcttctggatgtacggcggaatctcgccgtccagggtggtgacggtggcgctcatccacttggtggcattcggatcggagcagaacttctccggatggccaaagctcgggtcctggtcagcgatacgcttccacatatcccagccgccaccgggcttcaggtctgggttccatgcggcgggcgagttctgggaacccatggtggagttctccacgcaaccgccgttggtgatgaacaccagatcgttctcggtcaggtcgatggaggatttatcaccctcgtggtccacgtcgatgcgcacggcaagcttcttggtgggcgtgctggcagggttgcgcttgaagaagccggaggtggcctgaatcttctggatggtgtcttggcctacgccggtgtgctcgcgcttggggccggctcccccgccaatcgcgaattccacgttctcgaccttggtgttgtagcggaattcgacgccgtgcgattccagatacttgaccatcggcagaatcatcgactcgtactggttgtagcgggtgaaacgcagcgcggaaaagtccggcaggcctccgatgtgatgaatgtagcgcttgatgtacagcttcatttccagcgcggagtgccagttttcgaaggcgaacatggtgcgccagtacagccagaagttggagttcagcacctcatcatcgaagaaatcggtgatcggcttgtcatacaggtcttcgtccggggtgaagaacagcttcatgatttccatcgaagccttgtcggacagcccgaacttgcccttgagccccgcgtccttgccgagattcttggtggcgcggcacagcgagtagttcgggtcctccttgttgagccagtagtactcgtcgagtacgctgacgccttcggtttcgatggagggaatcgagcggaacagatcccacatgacctcgaaatgattgtccatttcgcggccgccacgcatcacatagccaaggccgggaatatcaagaccgtcacaggcgccgccgggtaccgggtccttctcaaggatgtggatgttctcgccaggcatctgaccatcacgcaccagataacaggctgcagacaatgccgccagtccggtaccgatgatgtatgcatgcttgttgtccacgtcggccggcttcttcggacgtgcgaaagcctcataattgccgctgctgtagtacatattccgcctccttggggcagagttgacacttcatcaactcttcttgaatagacatcatgtcgcattattgacgaacgcgccataggcaacgttcggcgttctgccgcattcgccaataccttgcatctacggttttcgaggcctatgttggctgttggcccataactattgaaggcatacaggcatactgaggatgcggggtgcttcaccgaaccggatgattgataaggtcccgttcaatccacgccatgaccaaatcggcaagtcggtttacctccgcttcggcgagttcacggcctttgggcagatgatgccatttttcgatgcatccgcggcagcatgtggcggtagcatgctgagcggtgaataccggatggccgcgccatggcgtctgtctgccgtcgttcttcggttcggctgcgcctatgcggtctcgcaacatttctcgcgcatgacgatcgatggtcgccttgcctttggtgcgggcataggctcggtctttgtcggtcaaagcgaatttggcgcggaactgcgaatgagacagccgttccagcatcgtggcaatccattgttgctcgtcatcgttgttaccagtatccgccatctccatgcccatacgttccacagtagtcgcgcacatcgtatggtggcacacgccttagctccctctgatgaaggagcccccagcaaagccaggtgagggagaggccaggggcgaaacccgccaatcaggcggcaggcaagcagctggggccaaacagaatcttgatctcagcaaacaacgaagtatctcgcttgacgcggaaacgatcgccaaacgtgagcacctgagcgttacccttctcatccagcaccgcaagatgtacttcgcagtaaccaggatgattagcgagcacctgaccgagttgcatcatgcgttggcgctccaacgccaccgacggcagcgtgatgaccaacggacgttcatcctcggcttccaaggtcggaatctgcatttccgtggctctcagagaaacggtttcgtcgcgcaactccacttggccgcgaatctgtacgatggcgtccacggcaagttcggcggcggccgcttcatagaccttgccgaagaacatgcattggatggagctttccatgtcttcgatggtcacgatggcccaggggttgcccttcttggatacgcgccggtccacattggtgaccaaaccagccaacgtgacctgctgtccttcacccatcgttttggctcgatcaaccagatgcgcgatggacatttcacgcaaggacgcgagaatcgactgcataccggagagcggatggtcagacacatacaggcccaacatttcgcgttcgaagttaagtttggtcttcttgtcccattcctcaagatcgggtacggtcacggaagcgtcgcccatggcctccgctcccccatcctcggcatcggagaacaaatcgaactggccctccgcctgtttgcgcttcagactcaccaccgaatcgatggcggcctcgtgcacggtgagcagcgcgcgacggttcgggtcaatcgagtcgaaggcaccggccttgatcaacgattcgaccaatcgccggttcagcgcggtcaggggcacgcggcggatgaagtccatgaagttcacgaacttgccgcgcgggccttcgcgttcggcgatgatatcggccacggccttgtcacccacgttacggatggcaccaagaccgaatcggacgacgtcgccgactgccgagtactcgtacaccgattcgttgacgtccggcgagagcacctggatgcccatgcggcgggcctcgcccaagtacagtgcggtcttgtctttgttggtggcggcaccttgcaacagggcggccatgaattcgaccgggtagtgcgttttcagatatgcggtccagtaggagatcagaccgtatgcggcggagtgcgccttgttgaaggcgtagccggagaacggcaccagaatatcccacacggcctgggaggcctcttcggaatatccatgctccttcataccggcgaagaacggcaccttctccttggccagcacttcgggcttcttcttacccatggctcgacgcagcacgtctgccttgcccagcgaatagccggcgaggattcgggcggcggactgcacctgctcctggtagatgatcagaccataggtctcgtcaagcacctgcttcagaggctcctcaagctcagggtgaattggcgtgatcttctgcaggccgtttttgcgcttggcatagttggtgtgcgaatccatactcatcgggcccggtcggtacagggcgataagtgcggaaatatcgttgaagttatcgggcttcagggttttcagcagcgaacgcatgccgtcggaatcgagctggaacacgccgagcgtgtctcctcgggacatgagtttgtaggtttcggcgtcatcgagcggaatcttggtgtagtcgatggcgggtttgccgttggcctcgatgttcttcagggtgtcgtggatgatcgtcaagttggacaggccaaggaagtccatcttgaccagccccaacgtttcgcacgtgtggtattcgaaggtggtggtgatggtgccatcggtgcgttccagcaacggcgaggtgtcggtgatgggtgcgctacccatgatggtggcgcaggcatgtacaccggtctgtcgaatcaggccttcgatacccttggcttcttcggtgatgcgcttggtgtccgggtcggaatcgtagagttctcggaattccctggcctcggcgtagcgtttggcggtcgggtcgaagatgtcatgcaggctgatgtctttgccgccggtggccgccggaggcagcgccttggtgattttttcaccgactgagaattcataacccatgatgcgggcggagtctttcagggcctgcttggttttgatggtgccatagatcacgcactgggcgaccttatcggtgccgtatttttcgccgcagtattcgatgactcgcgcacgaccttcagggtcgaagtcgacatcgatatcaggaaggctcactcgctcagggttcaggaacctctcgaaaatcaggccatgcttgagcggatcgagctcggtaatgcccatggaataggcgaccatggcgcctgcggccgaaccacggcccggccccaccataatgccgtgatccttggcccactgaatgtagtcggcgaccacgaggaagtatccgcagaactgcatctggcagatcacgccgcattcgtagtcggcctgcttcaatacgtcgagcggcgggttgccgtcgtaacgcttctccagaccttcctcgacttttttgaggaacagggaggtctcatcccagccttcggggcaagggaatttcggcatgaacgcgccgtcttcgtggtcgtcgaacatcacgttgcagcgttcggcgataacgagcgtattgtcgcaggcgtccgggtggtccttgaacagttcgcgcatctcttcggcggttttgatgtagtagccggtgccgtcgaacttgaatcggtccggatcgtcaagacgggaaccggagttgatgcagagcatggcgtcctgtgcgccggcatcttcggcgtgtacgtagtgggaatcgttggtggccagcagtggtgcgttgagtttcttggcgatggtcagcaggtcaccggtcacctgagtttcgatgggcagaccgtgatccataagttcgatgaagaagttgtctttgccgaagatgtcctggaattcgccggcggcgcgcagggcctcatcgaattgaccgaggcgcagacgggtctggatgatgcccgaggggcagccggaggatgcgatcacgcctttggaataggtggcgagcacctccttatccatacgcggataacgcatgacgcgaccttcgaggttggccacggacgaggctttgatgaggttgaccaggccttcgtcgttttcggcccacatggtcaagtgggtgataagaccaccaccggagacgtcgtcgcggcgctgggcttcggtaccccaatgcacgcgggacttgtcttgacgtgcggtttccggggtcacataagcttcgatgccgatgatgggcttgacgccattggccacgcagttggtgtacatctcgtaggcgccatgcatgttgccatggtcggtgatgccgaccgcaggcatgccaagttcggccgcacgcttggccaaatcaggaatcttcgacgcaccatcgagcagcgaatagtgcgtgtggttatgcagttgcacaaagttgttcccgtaatcagccatgcgctccaccataccgtgtggtctgggcgggaaatatttatcgatacgtactataaggcgctattgctgtttttgtgggtggtggttcgtcgttgagccgttgagggagtaagtggagagcgctttccgggtaggatgttttcgaccaagataaacaaacaaccgcaaagcgcctgatgaacagcatattcaaccagctcctcaacgtcaaaggcgtggtggtcgagaccgtgcggatcgtcgattcgcccctgcgccccgagcccgtgctcgaggttcgtgtgcgcccgcgcaggggcatgctccgatgctcaccgctgtggcagacgtcgtcatggttacgaccaaggtggcggcgtgcgtcgttggcgtcatcgggatttcggctgctggcgggtcgaactggtcgccatgatgccgcgcgtggactgtcccgggtgcggggtcgtggtcgcgtccgtgccgtgggcggaaccgggcagccggttcacgcgcgacttcgagtccgagtgcgcgtggctgatgagcgaccaagccaagacggaattgaaccattgggtgttctgggcgtcccacaaccgtatccccgagatagtcgaactcgcgaggaggatcaggagacggcgcccggacatcctcaggaccatccaactcggctactccaacgccaggctcgaggcgtccgacaaccgcatcaaggtcaccatccgcatggcctacggcttccaccacgtcaccaacctcatagcactcgtcatgctccgctgcggcggaatcgacgtccgactcccacaacccgcaatctaacccacgaaaacagcagaagcctcaaaagtaatgagtaaatatgatagtctggccaagtatatatgtatccttgacggagatagttttggctcttgggttattgaccgtgaaaacgatggaacgctcgaacatccaattcagatgccatatgtaagctactctgatatggtgcatcattttatcgatgatatatatgattttatcgaccataacaaggacatggagctgaaccgttacggtgacattctgaatcagaatggccttaaatggggaagcaagtctatgagcaccgcagatgtatcgaatctggatgcacagtgtatcatggcattgatcaccggagctgtccgggcagaacgattctgtgatggtgctttgcttggatttttcaaagatggcagtatccggaaatggctggagcgactgaaagaacttgataatggcagcggaaccgaggtgagataaaggcatggctgaaattaagagcgtaaatgaactgttgagcatgaatctgaatattccggactatcaaaggccgtacaagtgggatattcaaaacatcgacgatttattcctagacatcaccaatgcaattagtgatgcggacagatacagaactgagttcaaataccgtatcggaacgatcatcctgcacagaacaaagaatgacacctacgatgtggtggatgggcagcagagaatcatttctctggtgcttctaaagcaatgccttgaaccgggatttgagtgttcgattctccagatggatttcaccaacaaggtgagccagttcaacattcacaggaactatgcgtttatcagagagtggttctccctaaagagcgaagatgtaaaacgggactttatccatgcctttgagcatattttagaggtcgtcgttgtttgcgtagacaaagtaaccgaagcgttccagcttttcgattcacaaaatacaagaggtaaggcattagacccgcatgaccttctgaaagcgtaccacctccgtgaaatgaaaaagtatccctatgaaatggaacacgctgttacaaaatgggaagcaaaggatactgagaagatcaaagagctgtttgatctatatttgtttccaatcttgaattggagccgaggcattaaaagcaaaccgttcacggccaaggaaatcgacacctataaaggtatcgcagaaagctcaacctattcttacgcacgacgggcaagccgagctatgccgtatttccagattaccgagccatttacttccggcaacgacttctttgaaatggtcgagcactatatgtatctgctccgggatattaagtcggagatctgcaacaatccccgtttcaaggagattaagctggttatctgcggcggcaatgatgtagaaacaccggaagaaatggacaaagtaaagttcggctctgccggtttcggatacacgaagaatctgttttattgtgcgctgctttgctattacgacaagttccataacttcgatgaaatggcagtcaagaagctattttcctgggcgtttatgctccgtgtgctggttgtagtttacgcaaattgtgatatgtattccccagtatatatggggagttagaaatgtattgagattagatagcctttttctccaagtcctcacagtaaacgcttgaaaataaatgttccagttcatttccgaagttgtatgagattttaagtttgcggttttcataaactgttatctggtctatcatttccacaataatatctctgtctaattcttcaatgtctttcagttccaacaaccgccttaaccacggtgtttcaaaaacatcttctgttacactttcctttttcttttcttccagcgtttcaatctgtttggagtaaagcgtttctttttgttgatagtcctctcgataagaaagaaattcttctttagaaatcagttcgtctttgtaatcttcataaattgactttttcaacttcttcactctttcaagctctgcttttaactttatcagttctatgtctgttgattttctgatttttgttgctgtgaaagattgtgattttacaagttcctgcaagttctctacattgcggataatctgctttaaatctcccagcacaatatcattcaatacttgaaacgggagcgtgtgcggagtgcaataatcttttccgcttcttttgtaagttccacaatagaatgaataggacttacttccgtcagcacgtcgccagaaatttttcatcattgcccgaccacaatcgccacacttaataaaacctgcaaagatatttttatttgtttctaaatcaatatccctatgcttttttgtcagcagtttttgtaccttatcccacagttgacggtctataatcggttcatgtgtattttcaacccttatccagttttctttctcaactagacgctgtttgcttctcatacgttgatgtttctttccttgtaccatgtttccaatataaatctcattttgcaacatcactttaattgtagaataagtccaataagaagttttttctaaccgattacaatttttgtaattttctccattgagctttttatattccgacggacaaaggataccctctgcatttagtatttttgcaatgctttgtttccctattccttgtgcatacatagtaaatactctttttacaacttcggacgcatattcatcaatcacaagtttatttttatttgcaggagatttcttataaccatagcttgtaaaagctccgataaattctcctgctttctgctttgattttacagtcgcttgaactttattagaaatatctctggcatactgttcgttgaatatatttttaataggaagtaacatatcgtatgcctgcttcatactatcaatattatctgttacagaaataaaacgaacattaagctctggaaatattctttccaaatatcgccccgtatcaatgtaatctcgtccgaaacgggaaaggtcttttacaacaacacaatttaccttgttatcttcaatgtcagcaatcattctatggaagtctggtctattaaaattcgttcccgtaaaaccgtcatcaatataaacatcatataagataaagtcatcatgcttgttcacatattctgttaaaagttttctctgatttcctacactatcgctttcttccttatctccgtcctctcgtgataatctgatataaatagccacgttaaataagtttgaacctttttgataaatcatttttccacctattcaactgccgtacctatgataatattataccataaagtacggcttctttccattgttttcaagggttttaccctcttgatagtcctttttttacatgagatttcacgatacggacaagcaattcctctacggaaaatttacctaaaaattcccgttctacgatatattgtgcaggttcttttttagccaagttatcagcccccttagtcagctatctattctcaacatacgcacataggcttatccaatatgcgtatttttcacaatgttacagaagcagacagacggctttggaaagctccgttagtatctcaactattcccattcttgtgggcagaaccgcaccatgcggacgtatcattattctgtgaggataggtcgtggcaaaacgacttttccaacagtcgctctcggatcactatgtgggtcgctcgctttcttttgaaaaggtcgtggcgtacagtttccgtggctcactatctcacaaacgtatctgtctgctttattcacttatcaaagagctgtggcgaaagcgtgttgctttcatgtgaaaggcaagtagtagagcagaaaagagggggattgaaacaaatcatgctctgcttattttgccgttgttattcttcttttatctctaaggctatatcaaaatcgtatatcattttcataagtgcttctctgatacgtccttttaattccatatctacaacaatatgtacgtttccatagtcatcatagagcggacgcagacaacattttgatatgtacgggtcataaaactgcaataacttctcaatcgaagtttcgttaccgtccattgccgaagaaatgagataataagacgggtgtttactactcatcagttttcatctcctttaacatttttctgatttcttcaagtgacttttttcttatacgaaatgaagtggatcggtcaatatgcaataaatccgcaatttctttgtcactcatttccaagaaataatacatcagcaaattttctctgctttgttcagaaagctttttcaatgcttctgccagttcatcatcaagaacacgaatatctgtacagcatacattgaaaagtgtgtaatctgtgtcgtaattgtcccaaacaggcagattatccaccataatatctggaagttcacagaaaaatatttctttgttcttttgtcgttttaattgtttataatagtcttttacaacactacgaacaatctttttcaaacaacattcaaaacggcattgtaccgttttctgaaagtcagatggtttcatatactcgcacctcctttcctttatgagtgaaaaagtgtgtatccctcttttcgcaccatataaggacagcgaggtgtgatttgttgcaagaatgaagaaaaaaattaaaaaaattttaggatatgaaaaaagcccgcacaaaacatagcgtctgcacgagctttgaagatagcaggtatataaaaatactgctgtactaaataattttttaattgccagtatcaatagtgagatttttacatagttttctataaaacagaaaggcacttcaaaaagaagcacctttcccagtttgttatttagtcctttttatttcttttacgttttttaccgaataaaacagctaatataccagttgaaccagcaaacatagaagcgaacaaccctacatttgtcatatcacctgtttttacagggttcttttgtccgctaggttttgttggagtagttggcttgctcggtttctgtggctgttgtgggcttacaggtttatttgttgctttttcttttacggtaacggtaattgttttgtcagtaattgcaccatttttatctactacacggaaagttacatggtaagtaccagccttagaagtatctacattatttgcaacgatattatcttttgttaaagtaatagttccgtcctctttatctgttgcagttacatcttttaatgggtcgaaagtatcgcctacattcaatgtaatatcgttagcagaaatggttggagcagagttaaggttgtctgtattttgtttcacagttacagtaatcgtcttttcagtagaagcaccgtttttatctgttactttataagttacatggtaggtaccagccttagaagtatctacatcatttgcgatgatattatcttttgtcaaagtgatagttccgtcctctttatccattgctgtaacatttgccaatgggtcaaatgtatctcctacattcaatataacatcatttgcagaaatagttggtgctgtgttgtcttctccttgtgagtttaaccataattccacttttaaaacaacttttccgtctttataagtaccgcaatcatactcataagtaactggtttttttacatcatctaccgttataattcctgtatctttatctaaagttccatttgcagtaacttttacttttgaaatatctattccttgttcaacatctttttttaagtcgattttatttcctttaatatcaatataaccgttgcctacaaaatcatgattattttcaagaactttgttatctccgacattcaaccagtataaatcatcgcaaattaattttttaatttttgtgtttttacttatatcaagacctcttatcccttgttcaaaaattccaccgcaacgtagcatttcaagttctaaattattgcttaaatctaatttttcaatagttgtatcatgacaaaaaaggcgtgtcagttttgtgttttttgttacatctaattcagctatatttgtcatataacatgatagttgtttcaaattagggttcttacttatatcaagtgtttttacttttgtatctcctatatttaaagtggctaattgcggattatgtgtgacatcaagttccattaatcctgtattgctacaagatagttgttctaagttaggattgtttgttacatctaaattggaaatagaggtactatctgcaaataacgtattcaatttttcattcttagatacatcaagactgttaattgatgtattctcgcaaatgagtgtttccaaatttggataacgtgttaaatcaacgcttcttacttttgaagaactacaatctaatctttttaaagatgagcttttaaccggacttaagtctgaaacagaagtcgtagtaacatctaaagactgcaaatttgttagatattgaataccctctaatgaagatatcgttttcataccatgcaagtttaagaattgggcttttgatatttcatcaacagataacacactatcgccgtctttatcaaattctgcaatgatttgttctctaaatacttggtctggaaaatgtgcttcatcaatagcaatacttccagcctttacctctgtatttttgctttcttcgactgtcttatcttcagtaaccacttctttttctggtgttgcagatgtttcctgttttgtactttcttctgttaaatcttcttttaaagtttctgcattttcagcagtttcttcctgttccttgtctgttatattctcttgtacttctgcgttttctgttttctgttccacaggaacttgctctgtcttgttttcttctacaacggcttcctgcacaacttctgtgttttcctgtgccatgacaggagtaggaagccctgtaagtgcagttgttgttccaatcatcaatgcggaacttattgcaagaacttgttttttcttcatagtttgttcactccttatttttcataaattctttgcatagaaaaacgcacaaactcccccttatagctgggtaatctgtgcgttttgtttattattgatagaattgaaaaaagggcagaatttacttgtctgtctgtctgtctgtctgtctgtctgtctgtctgtcgcaagcgtaacaatgtgtgaacatgactgtcaaccctttctttcaaaaaattcaagccttacttctatacaaaaaacattatactggaaataaatactactttcaatctttttataccgccaaactgaaaaaagttgccacaccataaacctataaatatagcaactttccgcactattaaatttccgagttatcctctataagctgaacataatatgctcttttttcttcgggaactgtttttataaaatcatcaatccattgttccatttcctcaaggataccctcatcttcataatattctggatattccagatagatttcatgttcccgttcttcgtgttcttcctctatcaatgccatatccatataccgtccaattaaaagttgaagatactgggtatagcccagcgcattgacaaggtaagtaattcgtacatagtccttttgtgtcatagcttttttccctgtcagcagttcatagtcacggaaacaacagaccgataaaaattcctgttcctgctgttctgattgcttcattgcacacgctcctttgttaaaatttcagatttttacttattttacaaataaattcttctggggtaggtgtcttatccccgaaaagccgttgaaattctgcttgtttatttgggtcatcattatttcgggcttcttcaatggcaagttgcatttcttttcttatttctgcgacggaacagccatgtaattttgccacttgttttataagttctttactattctttttacaaaaatgtaacataagaatttgacacctccagttcttttgtcatttttcttatcataacgcaaaatttcttccttgaatatatattatgtaaattattcatttacacagagtattatattacactctgcgaatggttacaatataaaaaagcaggaaaggagaggaaactgtggaagttgattacaaagcaatcggacagcgtattaaaattgcaagaattaaaaagggagtaacacaagaaaccgttgccgaccttatagacattacaccagcacacatgagcaatgtagaaacaggaaaaacaaaagtcagtttaccaaccttgattgcgattgccaatgcactttctgtatcagtcgatactcttttatgcgataatgtgattgcttctaaaatcgtttttgaaaaagaagcaaaagatattttgtcagactgtgatgaatacgaagtacgtttcttagtagatttaatgaagtctgctaaaatagcgtttcgtaaagacaaggatatacgcaatcaatttcaaaaataaccgtagttgtaaggcacataaatgtgtattacaggctatggtctttttatatcatttatcctacaatcttccagttactatccttatgtagcacaagctcatactgcgatacttgtgtcgcctttgtctgattatcaaggaatttcacagctactttgactttcacattgtccccgtcctttgtaaagatagggtttaccaattcagaataaagatagtccctgccgataggttcaatcacatttccagctacatagtaggcaagctctttttctgtggctgtcgggtacagcttaaagaatgtatccaaaaaagcggtagcgtcattgacagtatcagcgtctacacttgcgtctgcttctggtgtcttaggctcatagtctgatttttcaactgctggtgcaagggtagggttctgaacaattaccatatccccgtcagcgtccacatggacttttacagtataggttgctttcacattgcttgtctgttctccctcttttatctgctgatctacttcgtaggtagcagaaaaagtgtccgttcccgactgttcgatactccacacaatcacatctgtaactgtggagctggtcggtatatcggttcggattgtatctacattcaagtcctgcaattcttttgtcagataatcgctgattgcctgcgtccttgcttcgatagcttctttgctgttactccatgtgtaataggacttcgcaaagttctttacgaaattttctatcccgttggtgttctgcaagcgaagttcaatgatttctttttcatgggtcgtgtgctggtcgatagcggtaaaattcttatacaccccaaagttcacgcttgcgataagcaccacccacaacgcaatcacagttttcttatgtgtgcctaccttgacagtacgcacctttttttcttttggttctttaatagtttctgtctgtttcttatttttcttaaacatattttcaagtcctttctattgttttactcgtcctgcaccgattaagtgctgttgccagtaactactgcttaggtctgcatatcctatcgggtcgcctgcgtggtacatctggttatttcctacatagataccgacgtgggttacatacgaaccagcgttataagtggaatggaaaaataccaagtccccagcctttgcctgcgaaagcggaatatgttgggtagcgtcatattgtgcttgtgctgttctcggtaaggagataccagcttttccataacaccattgcacaagtccgctacaatcaaaggaagtgttcgggttactgccaccatacacatacttccagccttgatatttcaacgcttcattcataatcgcttgtgccgtcgcattatcaaagtgtgccacggtcagatattgattgactaattccacatagaacatatttccatagccataccgccagcccccgttcttcgcaacagctatcgggttggtgtaggttactttctttccacccgatttctcacgggcgaagctctctgcaagattaaaggtgtgtttctttccttttcctgccacatatcccacatagccaccgccatagttataagattgtatcgttacattcaaatcgtcgataccttgatttttgcaggaagaaagcagggacgcaaaatacttacacccctgcttgattgagctttctgtatctaaagagttgggtggtagtcccagactttccgaactctgcataacatcttctgccgtaccgccactttctacttgaatgatagccaatagcacattgacatactcggaaatgccgtattctctggcgtatttttctaccataggctgatgtttcaagacttctgcggataaattcatacctgtaatgccagaagaaaagttgctgttctcgtcgtcgctgtccgcactaatcaacactccaaagaaaagtaccagagaaaataggataggaaacagagtgccaatgatagcgatatgtttcagtttcattttttcttctgtcctttcttcgttacaaggttacgagttttctctgttgtctgctggttcttctggacgctctgcgtctgctgaacctttgtcctgcggtctttggtgtaattctggcgtgtttcctgcgatactactttttctacattctgcctatgtactgtctgtgtaggttgggtcgcttttctatcagaagcaccagaagatagcggacgctctttgataacatttgtcttgactggctcacttgctttcggagttggagctgtggcagggcgtttgactttctgtattttttccgtactcggctttgaagctgtggctggtcgctcatggggacgggtagctcccgttgtcgctgatccgtcagcctttcgctgtgcctgccttgcttcttgtgccttttgaagctccatacgcttgtcagcaatattttgtctatgctgttcctgcctttccaatcgtcccgactgtctggactgctgttcctgcaccatgccacgcttgaagtcggacacgctggactttgctttttcctttgcggaatacaccgcataagcggtctgtgtcggcatatccttgatattctctttgacagcgtttgccttgtctttcactttatttttcgtatctaagacagcaccgacagcagaaccagcacgatttccaaaactggaagaagtgttgcttcgtgaaaaaatacgtttatctttttgaggattactccttgaagaaccattacccgatagcatagctcccgtaaccgcacctgtgccagctccaaccatacttccatgactaacagctctagccatgcgtcgctccattcttctagccctatgttgcataaacagatacggtctgcggaatatgcgtcgtcccatactttgactgtcgccagcattaagcgagaacatactcattaaatcgcccagcttcatgtagataccagcgaaacacactatctgcaagaacgcaaccatgaaaaatggatagtccgtggagatgttataaaacatactggaaatgctgaacgccaccgttacaatgagcgttattcctgcccttgtcattatggtattaaacacccttacgattgcctgctttgccatgctttcatagctcggtatcatggatagtaaaaagctgataggtaaaaacattgcaaagataataaaaagtatctggctaaacaacatcatgcccgtaagcaagaatacaaatattgttatccctaaattgaagaacagtaggaagaacaccatgcctaaacgatttaccacctgcggtatcgtcagattgttgttgtcgttgtcctcaatttctgttttcacgacttcctctctggtcttgccgtcctcgtcctctgggcttactgataccagtgcttccacacggtctgtcccgatttcctcagcgttgctgtttccaaattgcagaagtagccacggctgttccacttgaatagaaaataggctgtcccgtatcaagtccacgctgtccttgccctcgctgtcggagttggggagcatgatttttgttcccaagtccaaagaagcggtactgatgtctgatgaaaattcatttatcttcttgatgtagtcgggagcgtaggcaataaacgaagcggacagcacgaacaccaccacaaagttgataacagcgtgaagtgccttgctggtttcccgtttaatcagtcccgtataagcaacatacattcccaccactaagataatgagaagcaggaaaccaacatagaagcccgtagaagaaaagccgttctcggttacacctgcaagggtctgtatgctctttccgatactgtctgccatatcgttgatgaagtccagcttataggcttcctgcaccacatagcccgttgcattgcttaaataaaggcttatcgtccagacaaagttggtaatgcagtaaagcccgtactgtaccgattttccgataccgtccagccagttccacggcaaccacgaccagctattatccacataaaaatcaagctggtagttggaaaggggatattttgaatatagattttctgcgtttatggtatcgtccacaagccccgtcgcatgagccaccgtccccaaaagtgaaagcaggataagggagagtgccaccacgaacagagccattttgagaaagtggaaaatcttcttttttgtgaacgcaccttttatcctttctttcatcactccacctcatttctctgcacgggcggtctggtatcaaaggcgtgtagcagttcttcaaagacggggtgtatctgcaccacaccgacacgcccgtataagtcctgcaataagcattgtccgttctccaaatcacgaagccgtttctggttgttttcgtcgtccttgtcgataccgaaaaattctaaggtctgctttatctcattgatgtcggtactacgaaatgcaaacttcaagccgatattgtttttcagactttcctttgacacgtcataggcagactgggtaacaaaataaacgcctgcctgcatagctcgtccagcacgaaccagcttgttagagagcgtttctccttgtgccacatttaagaacgcccacgcttcatcaaggtctacaatcttaaaaatgcttctgtcgctgtgaatgaagtcgagtgcaaaggtactaatcacaatcagcattgccaccgataataattcaatggttgtgtattcattaaaagtagtgtctttatctggcaatactaagtccgctacttgaatgatattgagctgattatctaggctgattgtattttttactgtcccgtctgaaaacaataaatgtgcaaaatcatagttcgtaaaactggcaatatgatttgcaatatggttcgcaatcggcgtattttctttccgtaattctgtgataacatttaacagccctcggtgttcgctttcagatacattgctgattgcactaataagcacaggaaatttatctccgtcacgagtagagatacccgttaagaatgttaaaatttcttttgccagcgtcgctccgtcctctttgtctttcataatcacaaatgggtcaagaagtcctgcattgtccttatcgctggtaaggtttacgatattgatttcatgggcgatttctggaagtgtttctttccagttgccacgctctgattttgggtctaggataaccgcttgtcccccaaagagaaccgaataatacaccagaagattgttgcagaacgacttcccaccgccaagcgaaccgacaaaagcagaagcaagggcatttgtaactgtgccttttacgccctgcgaagctaaagacggttgcagatacacatttcttcccgtatcaacggaatagcccatatagatacccgtgttctctcctaactgctgtgtagcaccaaagccaagcccagccaagaagtctgattttacatactgcacataatcattgatatatcgcttgctggctggtaaaaattcagaatgaagccccagcatatccccagcaggacgcaccagctttacattgaggtcgtcgtaaaagtccttgacttcatcacaacggcgtttcagctcgtcaagatcgggtgcagacacccgtatcacgtagcttaacttatacatactttctttgctctggtctaaatcggtttccagctcgtccacgctgtctaatgcgtctaccacgtttgagctggtttcacttcctgcttgataagcgtgattgtcaaggtctttcaattcctttttcttgtttcttactgtggtaagtgcttttcggttctccacgatttctacattcatagaagtatcaacggggaatgtgaattgctgttgctggaaatagaagatttcacttgacggaaaatcaagctcgcctacaatcgcattgacggtaaaataggacacatagctttccttgtcctcatgttccaaccgtaaataccgctggctttcctcaatcacacaccttgtcggacggataaggtcgtagtattttatcagcgtttctttcttcaatttcttctttggtaactggtactcataatcttcataagcgataccgtccctgccgtaaagatgttccatgagatacccaaaatcattgatttccaagcgacgcaccttgaagcgacgggagattttattttccagtagtttttccattttcatgtaacggttgatttcatcattcgacatggaaacaaaatcattcatcagcgtatggttcacttcatggagaaattccgtgaacgtcagccacgctgattttttgaggttcttcagattgagctgttcttccgtaaccatgagcttaaagccaagaaaaaagcggtagtccacttgattgtccccaatcatagatactaacgcttcggtctgttcgtctatcttctgataggcaacttcctttaattttccagttaccagcttctttgactgctcctgcatactgcggattgagctttctgtggcaatctgcaacgcatgaattttaccctcacgggactgtgcgataagctgtcgaaagctgtcatgcacgataaatttctgttctgcggataagaaagaatagttgtacggtatcagctcatagtaagcgaatacctcattgtccttgttccagacaaggttattgtcaatatattttatcgggaacatagttcacactccttactgccgtgattgtttcattgagtatctgcttatgcagttttacggcttttcctgcataagtgattttaggtcgcagggcataagttatctgtgatttcaaaaagctgtacggcttctttccgtcaaaggttttctgcgacataaaccaagtgagagcaacgggaataccaaagtatttgagaaatgctccctcaatcatggaaagtgggggaatatccccaaacagaatgatgataaattccgtaatcacaaaccatgtaatctgtgtaaaagtaacgggaaagggtaagttaaagtcattgattgcatataagattttttccacgttccagatacccgtataagatttaatctttttcaagttctttcagctcctttcaaaatagaaaaggacagccattttcagactgtctcttaaaagagaaatacgctgtcagtagcaactatgcttgtcgctgatcttccagcgttaatatggtatctcacacatacctcggcttgtttcaatgaagcaaccgcccatatccaaatctcgcccgtaggcttcatagtcaatatagttctgtaagctgggtggaatgtcgccaagtgcctgcaattcgtctatgtagtagtaggcaacgtctgtcatggtttcacagtcgggataataataaatatcatccttgtgttccacgacttcttccagcgtcccatagtggctgataaattcgtccagacattctacgatatagtcgggaagttcctctatcatttcatacatctcattgagttcttcaatggaaacatactcgccaatcgcaatggggaagttatcggtatcatggattgcgtattcctcatactgttcattcaagccgattttttcttttacatcttcctcgtcaatgggaaatgtgaaccaagcaccgactaaatagccctcattgtatttgccaagattagcaatgtaaaccgccatatcatcaatcataagcaccacctcatttcctactctgagagttcaaagataccgtgtaccgttactaaaaatttcccgtgttcctgcaagtgagaagcataggcttcaaagtcaaagtaatattcttgacagtcctcggataaatgcttaaatgtcgggtcgttcatcaacttttgccttgcaacatcaatcatgcttttgcagttgggataaaccgtaatcacgttcctgcaaatataaagtgcttctaagttctcatatacggtcaaaagtgctttatattcttcctgcatatcgcttgatagctggtggtacatataatttaattcattgagctggtacacgctggtatgttcgtggacttcatcagcaaagggcagtaccttttcgataatacaataatcttgactttctgcaccgatacctaacttttcttcaaactcggcaacatctatcggcaggtcgaaccagtatgatattgtttcttcgacagttgttcctctcgtttccaccagcacccttgtttcctgcattgttcctcacgtcctttctgttgtttcatcacatcttttaaggtctggtacgacataccaaacacatatttagaaaaatcttctaactgtctttcttcatagtcggcagggttcagtcgtttcatttcctgccacaccttacgcttgtaaaagggcaggtcggaaatgtattcacagccgacgtttgcctgcatatccttaaaaatatcgttcatttcatcactccaatctgaaattttgataagaaaaaagcagtcaatcctaagactaactgctttgtgtgtatggatatgaaattgttaaactggaagttatagtgcaatctttttccattttctaatcttggttctaaaggttccgaacggagcaactgtattaacatgtatgaatttgtatacttcccagacagctgttttagttgcttcgtcagcccattttctcatatgtggtttaaataattcttcctcactcagagaatcaatcattacataaatagagttgatattctcattcaatctgtctttcaattcttgcagtgacagctgagcatatgtatctgtgaaccattgatataattcgccaagctgattccacttaaaattatccgaaggagttttgacaggaataccctttctttcgtctgattcccatttaataacaagagttgtccagccaacctgataagcaagattttctgccggagttcgatcgacctcatcaattctcttatcttttaaatgctccggaatatcattaaattctgaaatatactttgcaaagcttttatttatctcgtttttaagctcgtctttattctcatatgttctcaatagtctatctcctcagcttccgattttccagtttcaaaaaaaggatttttcaaattagtctttgcaaataacctttgaaccttcaccatcaattacaattccctgatggttgttaatagggcatagattcaaatccgaaaattcagtcattattttctcggtaactttcttaaatggtgctgtaagataatgcggaagaacatagaaatcaatcaaatcaagccctgcatcatcttcttgtgagtagtcctccggcttttcatccatttgctcgatatattggatgcttggagcgcatataatcgcacctgccgattcaccaatcatcagttttccctttgccaattcttttttcaacagctcatccgttcccgttttacggagctggtctataaggaaaaaagaatttccgccagtaaaatatatcacatccgcatcttcaaaaacagactgtatcgttgaataagcctccgttgaaatatcaatttcagttacgattgctcccaactttttgaataattttcgagccgagccgacataaccggtgtagccttcacgcagcgaagctgttggaataaatgcgacttttttattttcaatttcttcctttatcagacttcctacacttgaaaagtgcgaacataaaaacagtttcatcaatattctcctttatatataaattctaatttgtcgtttttttcatatccatattataccattcgcatatcagcactacaataaaattttacgcaccgataatcttattgaacagctctaacagtacatctttcacaccgccagcattgaataccaagccgacagcaatcaaggcaactaccaagaagccgataagttttgaaaactcacgcttgaaccctaagtagataccgataaccacaatcgccataagcactaagctctgtgcgtttgataaaaaccattgatacaaattctgtccgaaattcatttaattgtcctcgctttcttctaattgtttcatttcatagtcagcttctttgccaacattcaaaatacacatcaagactacgccaatacccattcccatagataccagcaggaagtcttttaataatacccacatttttcatcactcctaactttctactaaatcttttgtaggggtcgtctgctgtttgattatcatttcatgcttttctgtgagctttgcctgctgttcgattgtttccatgtagtctgtaccgtttcccttatcaatctttttcagcattttcaaggtcggtgctacctgccgttgtacccaccgcaatgtacggtctaaggtgtaaggctctggctttgtcgtcagtttcaaactctgtctgttatcgccgataaaccaagcccagcggtcattgagtttccagtcattttttcgcttgtctggttcttcatcaacaaaccgcacatactggttgataatagaaaaggcagtctgttctgcgtcataataggtcagcaaatctcgtactgcatagtaggcacgttcattgcgaagccgtatctcaaaacgattgataatatccgcttcttccagaggtgtccctaacttgacgtactgctcatagtccttttcatagatacagaaatatacatctgatttcagcgacccaagataaagagtacgtcccatatattctctgtcgtcctctctgtgcttgataagctcgcccgactggtaaaacttataacttctgcactttccgatatattcccgtttcctgcatttttccgcaagctctggaatatccaaaatgcccgtatggtcgttgatagcaaggtcgatacgcttcatcacgccaccgtctatgagtgcgtccataagaaagtcataccagcttctttgctgtgccagcaggtaactttcaaactgcctgcaaccacgcccctttaattctaaaaggacacctttttcttcgtcagccgacgtatagataaagatgtcccccagagaataatgctccgtataactgtaatgtccgtaatcttcatggagcatataattgatattcagttttaatatatctttgatgatgtgctgtatatccagcgtgggaaaacgaattttcacataatcaaacagcatggtaagcggtgcttctggattgaaccttgccagttccttatgcagattttccagaagttcctttgacggcttcatttttccgctttctatcttgttgagatattcccttgtgataccagaagtcaccgccagtctgccttgtgagataccgtaagcaatccgtttctcccgtaattcttttatccattgttcttcattcagaaccatacccccaatctgtcaagtgtgaagttttttaaggcgacttcacagccgatttttgctaggaaatcatgccagaagccttatgtttcctatgttttttgtctattgtctatttgcaaacgtacccctctgttagataccgaggggttttacctgctggcgtggctgacgccacaccagcaacggctagttcgtgccgtcgcctttcgcttcgcacgtcgccgtcccgtcctgccttgctgtatgaatttacataacggtattcataccaagatacagcacaacacagtctatttcttcattcctgcatacttctaaggcttcgttatcaaattcaaactcatgttgtatatgcagaaacaaggctttatccatgacaataaagttgtagcaaaatgtaacattcaaaaatgacatttcctcgtccagaggaatagaaaagaacagcggtaattccaactgtttgttttccgtttcttctaaaattcctctcattctttcatggaaacgctcaaaagggtattcgtcccatttttcaaagtcgctatttgctgtaaaatctaaatcagcataaaatttatcaatgtttaagcaaataccgattgtacttgtttctgtcgtttcattcattagttgcatttgtaaataacccatagttattctttcactccttttcctgttgttctggcataacttgtctttcttgtgcaagtctgccgatagtctgtaaaaaatcatgtcctttcgggactaacggcgtgtaaaattcgcttataacgcttgttcccacatcacaatagccacgccccttgatacgcttctgaaaaaactgctttttcacatctgaaccaaacagcataccgtagcctaattcgctgatacgtccaagtcccacacggaaattgaagttatctctgataccgtccgaaaaatactttgcgtctggacgttggcaggcgacgataaggaaataacctgcttgtcgccctaacataacgattttctttaactggctaagtaagctcacgctttctttcgtccccagcatttcaaaaaatgctacatattcatcaaagataagaaagcagggtggcagtcccagataggcgtagttttcgcccgtcttatagttcgggtgttgcttcatttcctcacttcgctgtatcatgccctcataaaaggcattgacgcaatctatcatatcttctttggtatgatacacatttcccataactgtctccaagtctgcaaggtcagcgttcttcgggtctaatatgtaaagtacagcgttggtatgcagtaaggcttcaatgagcgtcagcagaaaataagttttaccgccaccagttccaccagcaatcagagcgtgggggagtgcgtcatattcccagacaagatttttcatcaatctaagacagcctttttctgcacgtacttcatcaatggtaatgcgatttgctatcatatcataaagcagggtatattcgatatagccgtcatgcagggtcttgtcggtcagctcacaatacaagccactttccaatttatcctctaaccgtaaaagctggtcttgatatttccccagcgtgatttcacagcggatatgaagcagtcccttttccatttgatagtaaatctttggaaaccagacgattttttctcttgatctgctttgcaggtcagtaaaaaaaccgctgtcttgtacggtatcggcttcataccacttattttccagtatcattcttgccagcttttgacggtgcaggagcttcttgaaactatcgtaacagaagcggtaatacagaaaagcgaccaatgcacaaacaccagtcgctatcagtatggttatgaagttgtaaggggagatcgtcaagccgttctctaacaagctgaaatgctcccaatcggtacgcatgagctgtttcgtattcagtagcaaaagaaccgctacgaatacaaacagaagcgtccctatggaaaagtgatagacaaggtgcttgtcgctggctctgatacggtgtcctttgttccaaatcttttgcataaatcaatcactcctttctgggtatgaaaaaagcagtcaatcctaagactaactgctaaaataatataactgtttatttgtattagaagcgttagagtaaacttctctcttttaacatttcaagaaattctttatacccaacacaatcacaagaaactgtacagatttttttgtttccaacaaatatttttaatcctatttgctctttttctatgcaacgtgaaatatcattaaatgaaatttctcttgttcttccaaccgcaggagtaatgtgtaaattattaccgtcaattacaaccttatgtctttttaaagcccatgcacaaaattcaatcaatataacaaaaatagcgaaaacaacagagtgtccaacagtattatcaaatcccatgaaaagtcctaaagctattgcaattcctaccattatcaatgaacaaacatgacatactgtttgataggcatgtgatacaaaaacagtatttgtgaatttttcttttttagttgctttttgtgtcttatctaacacgagagaaataacagggacaacgaatacagcaaatataatagctcttatcataaacagcactccttataactaaaattttttcatacccatattataccagttctatatatccgctacaatgaaaatctattcagtaagcctattttttcggctgtccctgcggtgtatggttctgttgattgcctgcgttctggttgcctttattcttcaacacaatatcctctgcctttacataccagtccacatctgcaccaccaaacgtctttcttgataccgtatctgctacgggattgacaagctccacaactgcattgtacggaaattctcttaacggtacttctggcggtacggacacagggataattccaccatgcagactgcacttcaaatcatagatacgctttttaagctgggtacttggtgtcccatcctcattctgcaagaacacatctcgcaccgctgtaaattttaattctccaaatgttttctctttgtcaatgacaaacccgtttgataatctcataaattcttcactcctttacttttcttcaactgctacaatatcatcagcaactaacacataatcggtatgtcccatatccccgattgcgtaacctctgccgtataacctcggattgacaagttttactttctgttcatacttgaaatgcttttcgccagcctgcacgggaatttccacgacaacattttcgcctttctgtacgtcagaataaaggttatagcttcgtctggctaagaccctgcggttatttttatctctttcaaagactggctcgctttcgcctgcaaattcaagagttccaaaagactgtgccatatctggcacgacatatttcatttccatattgttttacctcgtttctttctatttttgataagttttttgattgtgatttcttattctggcggtttgggaagtaccagcaatcccccagatagtaaagggtaaaatcaatgcttacgcacccttgactatccgtgttcttgcaggttgttggcagacaagccagaataagcggaaatctgccgtttgacagcttcggcggagagcgtgatttttctttcatcataccgttaccaccttatgatttcttcattttacggcgtttgtagaagaagatacttgccagtccagcaccagaagtcaaaagaagtgcaagcagtccgtaaaggttggtgttatcgcccgttttggggctgtcgctaggtctgctaggcttttctggtgtcggtggtgtttcgggtttttctggttcttctggcttttccttaaaagtaatcgtctgtccctcgtcctcaatgtccttatgctcggtaactttcttcggctcgtctggattgcttaaatcatataattcttcaaaagttataagctgtttgccgtcaagagaagtagcatcaaaggtaaaggcaacttccactttcatagtttcgctgtcagcagtaaaagtgtaatcactttccacacgttttccattgataagaagttctgtattttcttctttcaacatctgccagcccacaagtttgtactgtgtaccgacttctaagccctctaaggttacggtatcaatgattgttacctcttttccagcttcaagctctttgttgccgtccttatcggtagcagtcgtatgaattttgatgatacgctctgtgataagtacggtttgcccgtcgtcctcaatgtctttatgttccgcaacttttacgggttcgtctggattgcttaaatcatacaattcttcaaaggtaacaaggtttttgccacctaaagcagacgcattgaatgtataagaaatttccactttcatttcttcatcatcagcgacaaaggtataatcgttttctacacgtttcccgtcaataagaagttctgcgttttcttcctttaacatctgccagcctttcaactgatactttgtgccttttgtaagtccgtttaatttgacagtatcaacgattgtaacctcttttcctgcaaggatagtcttttcgccgttcttgctggtcgctgtggtatggatagagatttctttttcgtattcatcagtcagcgttcctaaatcaatcacaagattatttcttgataccacgatttcaaaaggtgggataagttcaaaacctttgttactgtcgcaacgcatttcttcaatgatgtaggtatcataaggcaacgcacccttgctgtcgtctggttcagcagttccaaaccacacaccgtcctcgctggtcttgcctgcgtttgtattgtgcttatgagaagcccattcagcagaagtggagaattgcccgttatcatcagttaccaccacatgattttcgcccgtcgtcttgcttgtgatcctaaagggaacatcagcaagacgcttgtgtgtgcctgcaccgatttttacaccctcaatatctccacgcttaatctgattatagatagaatgggctttttcggttaagtccacgatttttccattttctgtgattgtaaaatcaatcggttttgcaccgtctgtcaaatatccgtttggagcttcaatttcaacgatacggaattttccataaggtaagaggtcagcagaagtagaaccgacaccctcaatatcggtacgaatagtttttacgacttcatttttcttgtatagcttgccctcaaccaatactgcattatcatttaaggaaatgatgtcaaaagcagtatctttcaaagtggcacttccttgtggctttgtatcgcccgtttctaaatctcgtttctgaattttgacaccgccacggataaccttatctgatacggaaaactggttatttccagataatacggcaaggtcgccgtcctcggtaatctgtgtaaggtataagccttttatctgttcggacttatcgccagtctgcatatatgcaccctctaacaagtagccgtttggagcttttgtttcctcaacggttagcgtcccaagtggaagaaccgccttgccgtcctgcatatagaagctgtcgccagataccttgtatgcgtccgctaattttgtgatgtagtgagctgtcccgttgctgtctgtttcagcgattgtctttgtaacccatgtacgagtagcttcggcagggagattgtctttattgtagaagcctacataatacttccatgtaaattccgcacctgctaaagaagcgttcccctgcggattgtctttctgtgtttccatatcaatcttgaaaagctcaatcaaagtgtccgttacttttggcgtatctgatactttcaaggttgctgtttcgccagctttgattgccaatggatagactgttttatccactttatatcctgctggtgcagataattccttgatataaactgtgccagccgttacctctacaacatctgtatttccgttttcatcagtcgtaagggtggcaagctgtttcgtacagtccttatcagcaaagacaccatatgttgcaccagcgattgagtaattcccgttaccgtctgtaatgctggtattactggaaatctttttaagtttcgcatttccgacatttaatttcgcccagaattgccccaattcctgaccctcgccagagtagatataaccgccacattcatagcgtcctttattttctttgacaaaggctcttgcaccagagaaaacttcgtcctgcgttgcctttggaatttcatcataagaagctcgcacgttatcgcattgccagccaagatgtacactcaatctctgccagactacaagctgtcttaaaaggtaggcgtgatttttgcttattccgctgtggctgtctgtgtactgttttacatattcgatagataaagcaacgtcgcttatctggtcggcactcatacgggtgcttgcgtcagctctggtcttgtagccgttcctaaaatctgtgttaatgtcgatacagtaagcgtcctcgccctcaacggtcaaatgtccctcgttaaaggtagaaccaatcgaaccgtcattcattactttttcaacgataccgacacgctcttttgactccgtccagtattgcttgctttctgcatgaacgggtgtcgtcggtaaagcagtaacgacagttgcaagagctaagaagcccgtacacaatcgtttccatgtctttttcataaatctaatgctcctttcattttgagtataaaaatagacgctcatttctgaacgtctacattattgaaaggcttgtcctctcacacatattctattttaataggtacaacagttgcctttctccttgtattttcgttgttttcatcacttgcgttatctacaacctccatgtagatatgaagaccctggggtttgacagcgtaaacaagtacgctatcggtgacgaaaattccagatatacaaacacaatcggtattttctccaagatcagctttgcccggatgcaccacgaaatatccggattgcagataaaggtgcagagagaaccggacagcctatccgatgaaaaaattgtatgacacgatcaaagaaatcaatggatatggaggtgcggaatgagcaaattagtaactgaacttcatattattggtgaaaacggcaatatcttcgacacagatatggagtacataatccctctataccagagagcctatgcgtgggaggacaagcaactcgtccagctgattgaggatattaacgatgttgcggaggactccaattactacattggctccttgatcgtttccaagcagttcggacgatatgaagtagtggatggccagcagcggcttacctcgctgtatttgctgctgaactgccttggaatcaaaacaaagtccacgctcacatttgcgtgtagagaaaaatcgaactatacccttagaaacattgaagaactactgctcgaaaaccgcagcaagattgatatggatcggattgaaccgggaatccaaagggggatcaggatactatctcacgaattgacaaaggatcatttcgacagggaaagctttatggaaaagctagctaaaattatcgtctatcggattgaggttccggagaataccgatctgaaccgctattttgagataatgaacaccagaggtgagcaattagagcaacacgacattctaaaggccacgcttatgagctatttgagtgatgattctgagaagggcttgtttgcgaaaatatgggatgcttgtagcgatatgaccggctatgtgcagatgcacttcatcagcaagaacaatgcggtaagagaggctattttcggctccgaatggaacagtatgccgcctaacagctggcaggaatacaaaaaggctataagtggaacgacacaggaaaccaccggacataaaatctgtgacctgatcgaaaagaacttcaaggttgaagatgatgaaggctatgtggatggtgatgtgcgtgttcgctttgaaagtgttattgagtttccatacttcctgctgcatacgctgaaggtctatgtgagtctttacggtgtcacccatgaaatagcaacttcaaaaatagtggatgaactcttggatgataagaagctccttgatgcgttcaacagagttgtatcctgcggcataacggataccggcaggatcgcagacaacaaagaagattttgccagagggtttattatttgcctgctcagaaccagatacctgttcgataagtacatcataaagagagagtacgcaaatgacagcgctgatggcgaatggagcttgaagagcctgtatgtttccggacagcaatcgaagaagaaagcatattacgggaactccgagttcacccgttctgacgaagaagaggcatctacaaagaccaatattatgatgcagtccgccttgcgtgtttcctacacttccccaaaggtaatgcactggattaccaaactcttgatatggctttcggaagctgattgcaagaatatcaaaaatgatgccattacaaagtttgataaagttgccgaaaacatcgctattgatgcagtaagggaaaacttctttcaggtttgttcgaacggtgtgtatgcgatgggtgtcaatactccgcatattgtctttaactacctggattacttgctgtggaatgacgactggaacggcaagaagaagaaatacagcgactttgtttttgaatttagaaattccgtagagcattggtatccgcagaatccatctgagggaacattcgagcaatggaaggatggtgttgaccagtttggaaatctctgtatcattcagagaaatgtgaactccaaattttctaatatgtctccggaagcaaagaaaagtacatttaaggatatgatagtcaaggggagtattaaacttcgcattatgagtgaactgacagaaaaaagcggcgacaaaccagccagcctttactggaaggaaagggcgtacaaggcgcatgaagaagaaatgcttggctatttgaaaaaagcttgcaacattgagtaagcaaaggagtcacagcgacaactccaggcgagagagtgacagctatggcttttctttacacttcggcgttgaaatgccaaaccttggcgggtatttctctgttgttgccgctgatcttaatgtggtcggtatagatgttcaatttccaatggttgtactcattggcgttgtatcttttacattcctgagttagatatgatttcagaacctcccactttaccatgaggatgttcctacccttcaagcggagcacaacaagggctttatcggtttcgctcagaacatgggcttgttcttctgtaatatcaacccaataaaaaccttgcggatgcatcttcgactgaggggtgaagaacgtgatggtttcgccattctgttttctccctctaaacaagattttgaggcttctgctgttttcctgagttctaaatagaagcgcaacacctaaacctcaactccctattgaacacatacacggatccgccgctacctgcccaagaggaccagtctcgacggcctgacggacgccgacctgcaggccatcgtccaggatgtttttgttcaatagggagttgaggttttagtcacgtagttttttcgggtttaggcggaaaggcatgccgaccacccgtgggccttagcctgatggtgcttctagttccattctgttttgcttcaatgtttgttcgacaggttcggcagtgtttttccgcagtgtgggctgatggttttccccggtgtcgtcatcgtttcccggtgatgtgagaggcatcggtgccgcggcctgtatattcccgagttgccaatcggttttgattcggccggttgccgccggccggcgctcgggaaggaaaggaacatggcgataccgatgcccattgtgcaagatatcaggagactcgaccggcagggaatgtcgcgcgcgcagatagcgcgtcgtctgcatgtggatcgcgggacggtcgcgaagtacgcggatatggaggattgctcgcccaagccgaaggcggatcgcaggtacgggtcgaagatcgacccgtacgcgcatctggtggacgagtggctggaggccgatcgtctgctgcccaggaagcagcggcacacgatcaggcgcgtgcacgaccgtctgctggcggagacggactacgacggcgagtattcgaccacgatgcgttacgtgcaccggtggcgcgaggcgaaccgcggcgtgccggatcgcgaggggtacgtgcggctcgagtgggcggcgggcagcatgcaggtcgatttcggcgtggcccgggcccggatcgctggcgagatggcggacgtgcattgcctggtggtctcgttgccgtattcgaacatgcggttgtgcgtggcgttgccgggcgagaacgcggagtgtctgtgccatgtgtttttgttcaataggaagttgaggttttagtcacgaagatttttcgggtttaggcggaaaggcatgccgaccacccgtgggccttagcctgatggtgcttctattccattcgggaaaggtccggaaaggcaatgatcagcatgccccaaatacagtctatccgttcgcgtcgcaggaacggtgagtccatcgcctcgatagcgcgcagcgagagggtcagcgagccgaccgtgcgcaagtatctgagggtcgacgacctatcggccaggccgcccgtgaggcgacgtcgtggttcggtgatcgacgagtggctgcccatgatcgagggcatgctcgccgaggaccgggagacctggcgcaagcagcggcataccgcgacccgcatccatgagcggttgcgcgacgagtacggggccggggtgtcgttgtcgacggtgacccggaccgtggcgcggctcaggcgcgaggccgcggcggagcgggaggccggtttcctggacctgtcgtggcatccgggcgaatgccaggcggacttcggccaggtcgacgtgcgctaccggggcgtcgtgacgcggatgcggcatttcgtgttggatttcccgtactcgaacatctcgccgtgccagctgatgcccggggagaacgcggaatgcacgtgtcaggctttgcttaacctgttcgaatggctgggcggggtgccccggcgcatcgtgtacgacaacgccgccggcgtgggccgccgacggttcgacgagatccgcctgacccgcctgttccaggcgttccaggcccattacgggttcgagtactcgttctgcaacccgtactcgggccacgagaagggcgcggtcgaggccagggtcggggccgtgcgccgaaggctgttcgtgccggtgcccagcgtgtggagcctcgacaacttcaacctgcgccttcccgaccgctgcctcgagctgggggacaaggaccattacaggaagggcgagagccaggccggcctgttcgaggatgatcgcaaggcgctgctgcccctgcccgccaagccgttcgacgtggtcacgtggacgaggatgaaggccgacaaatacggcaacatcaccgtctagggccgccaccggtacgcggccggacccgaacacgccggccatgagatgatcgtcggcctgagggccctggaggtggagatcctcgatgccgaaggcaaacgcgtgatcacgcatccgaggtcctacggggacaagccgaccgacagcggcgacccgtcgagccagctcgggctgttgtgcgaccggccggcggcctggcgcaacagccgggtgcgcgacgcgatgcccgacccgcttcgcgaatggatcgacgcgcaggacgaggccacgcggcgcgacagcctgcgtgccctgctgcacgccgacggcgagagcggctggcgggcggccgtggccggcatgctcgagatcctcgaatccaccgggggcgcggaccgggccggggtatgtctggccgcggcacgccacgcctcgggcctgggacccgtggcctacgacgaccccgtggacctgagcgaatacgacatcgcctacaccaaggaggacgagtgaaccagaagaacggacggaccgaccccggcccgctgcgcgagcgggcgaggagcctgttcatctcgcaggccaccatcgacgaaacgctcgaatgggccacgccccgccagctcgccgcgatagaccgcatgctcgccacggaactggccaacagggaggcgtccaaacgggcaaggctcatgcgccaggcccggttcccggtgcccaaaagcctcgacggctacgacttcgcgaacgtgcgcctgcccgacggatacaccaaggagcagctgaccggcctcgatttctgtgttttgtcaagttggagtaggccgtttcggcgtttcttttagtccatgtgagcggcgggtttcaggccgtttcggcgttggccggtcctgctggttgttggttattgcattggttattgcatgagggcgtgggtcttgcgccaggattcgccctcgaagcggatcatccgtccgtggtggacggtgcggtcgatgatcgcggcggccatgttggggtcgccgaagatcctgccccatccgctgaactcgatgttggtggtgtagatgatgctctgggtctcgtacgcgttggtgacgacctggaacaggagcctgctgccgtcctcgtcgatgggcacgtagccgagttcgtcgatgacgagcagcggggtcctgccgatcgcggcgagttcccggtcgagccggttgtccgattgggccctgaggagccgcatgaccaggcctgcggcggtgaagtagcgtgcgggtatgcccttgcggcatgcgttcctgccgagcgcgatggcgaggtgggtcttgccggtgccgggagggccgaacaggacgaggtcgtcgtggccggcgatgaagtcgagggtcgtgatctgcccgcgcccgtagtcgacggggaagcggatcggggtccagtcgtagccgccgagctccttgtcggcggggaatccggcggccttgagcaggcgtgagcgtttggagcgttccctggattcgatctcggcgttcatccacgattccatgaattccatctggctgggggtcgcgtccgcgagctggtcggcgaggacctggcgggtcagaggcagccgtctggccagggtcatgatcgttgcgattctttcgccggtggacgcgcgcctgcgtttcatgtcgggcatgacgaccggcggacggtgggttcccatggtcaggcctccttcctttcccatggctgtcggggtttcatgaacacgtcgtatccggtcaggtcgggtaccgactgctcgtacggcttctcgccggcggcgatgcgccgggccatggtggtcacactggcctcgtcgatcgcgtgcccctgttcgaccaggtgctctccggcccggacggcggcctcgaagccggacgcggcgctggccttggcgatgacgcggaacgtggtcctgcgtgtcttggcgtccatgcggtcgatggcgatcctgagtttgtcggggaaatcgtcacggatggtggaatcggtccatgcgtgggtcttgcggctcaacgcgggcaggagcgtggcggggttgcgcaccgtggccggcgaatccccgtacacgcgcggcagtctggcacaggtgcgtccgtcctgggtgcggatcgtcacgtcgaacgcgcgcagacccacgtcgagagtccagccgcgccacgaggggccggcgaggtagtagttgccgtcgatctgcacacgcccgtccttgtcggccttcctcacctcccaacggatcgcgtcgtacggcttggcgggaagcggctgcatatccatcttctcaccggcgaacaggccgccgatcggcgcgcccttgcggtaatgcgtctccttggccatcgcgtcgcaacgctccagcatgtaccgggtcagttggccgtgggactctgcgttgagcatgggcaccatgatgttgcggcgcaggaacccgaccgcgttctccacgctgcccttctcgttgcccgagttcgggttgcagaacctggtctccagccggtaatgctccacgaacagttcgaacacgtgcacgacggtgaccttgtcccacgcgatccgatggccggcgccggtggcgttgtcaagcaccagcgtcagggggaccgcgcctatgtgctcgaacaccgtgcgcagccccgcgcacacgcattcggcgttctccccgggcagggccacgcagtagcgcatgttcgaatacgggaacgtgacgaccaggcaatgcacgtcgacccggtccccgccgaccacggcctgcgccatgccgaaatcgacctgcgcctcgcccggatgccacttgagctccagatacccgtccgacgggaggcgatgctcctcgcgccaccgtttcacgtaccgctgcaccggcgaatacgagccctcgtagcccttctccgacacgagtctgtcgtacacgcgcttggcggtgtgccgctgcttgcggggcatgaaccggtccgcctgcagccacccgtccaccgtcgccctgaacggatcgagcttcgacggccgcgatacggagcgctccggtccgggagagcaatcctccctcccggcgtacttcgcgaccgtgtcgcgggccacgcccacctctttcgcgatgctcctccatgacatgccatgcgcgtcaagcaccctgatacgttgttgtacggacaccggtaccgtcattcctttcctttcccgagaaaaccgaacggtttgactttcaactcgggaaactagtccaggcaggacgggccggtgttcgtttctcaccacacgctgaagtggaccagaacctgccgctcacatggaagacatccacacgctcacacggcccactttctattgaacagacacatcgatttcgcggccaaggcgcaggacctcgtgttctacggaaagacgggacgcggaaagacccacctggccaccgccctgggcatgatcgccatcgagcaaggcaggagcgtgaggttccggcagaccgcggagctcgtgctccagctcggcaaggccaaacgcgacggcgccctcgacagcctgctcagggacctcgcccgtgccgacctgatcatcctcgacgagttcggctacgtgcccttcgacatcgacggggcccgtctcctctaccagatcatcgccggcagctacgagcggcgcagcatcatcttcaccacgaacatcgagttcagcaaatgggggacgatcttcgccgacgacaaactcgccgccgcgatcatcgaccgcatcgtccaccacggacgcctcatcgagttcaccggccccagccgacgcgtcagccaggccctcatgttcggcaagacggacaaccagtaaaacaaaccaccggccggcactcctcatgccgaaaaccgaaaaaaattagtgacgaaacacgaaacaccgacttgactaaaaacagccatggcctgatgctcgtgttcgagcatatcgggggtgttcctcccgtgatcgtgatggacaacgcgaccggtgccggccggcgcaacgcgaagggcgaggtcgcgttgaccggggtgttctccgcgttcgtggcgcattaccggctcgaggtccggttctgcaacccgtattcgggcaacgagaagggcagcgtggagaacgcggtcgggtttttgcggcgcaatctcatggtgccgcccatgcgcgcggaatcgtacgggcagttgagccgtctcctgctggagcggtgcgacgggctcgccagggactcgtattgcccgaggttgccggacgtgcccgtggccgaggtgttcgacgaggagagggccgcgttgatgccgttgccgtccacggcgttcgacccggttcgctgggaaagccggacggccgacaggtacgggctggtcgacatcgactcgaaccggtacctcgccggccccgattcggcgcgttccaaggtgccggccgcgatccggtgggacacggtcacgctcgcatcgcccgccaccggcgagctcctcgcggaatatcccagacagtacggacggtcgcgcaatgtggaggatcccgcgctcgtgcttccccggctcgcggtcaaaccccgcgcgtggcgggaaagctcgatccgcccggacgtgcccgacgatatacgcgcgtggcttgattccatggacgaaaagacgttgagggagagcctcaaagcgatcggggacgcgtgccgggcggccgggttcgatcccgcgatgcaggcgtgcggcgagatcctgcgctcgaacagggacatgggcctgcacgcggacacgctcacccctatcgcgttgcgcatgcgcgacggcgagtgggaataccccggcgggatcgaggagcccgacctgagcggctacgaccggttcatcaccggcacggacgacggaggggaagaacggtgagcgtcagacccgatccggtgatcccggagacccgacgcaggcgcgcgtccacgaccgagaaaagcgaacgcatcctgaagatgagccgcagcctgaccctgacacgcagcgtgctcgccggcacgctcgccgaggccacgcccaaccagctcgacttcatcgaacgatggttcacggccgaactcgactcgcgcgagcgatccaaacgcctgcgcctgctcaaacaggccggcttccccgccgacaagaccctcgacggctatgactggaccaacctgaagatgcccgccgactgggggcgcgcgcagctcgagaacctcgacttcgtcgccggatgcgaggacctcgtgctctacgggcccgtcggcaccggcaagagccacctggccatcgcgatcggacggctcgcctgcgagcggggcgtcccggtgcgcttcttcaccgcgaccggactgctcatgcgtctgcgccgcgcccagcaggagaaccggctcgaccgggaactcgcgagcatcggcaaggcccgacttctcatcatcgacgagttcggctacctgcccatagacgaggagggcagcaggctcctcttccagatcatttccgattcctacgagacaaggagcatcatctacaccaccaacatcgaattcagcggatggggacgcgtgctcggcgacaagaacatggccgccgccctcatcgaccgcaccgtccaccacggacggctcatcagattcgagggccgctcctaccgaagcgaacacgccctcatgaccaaataaccaacacaacgcagacaggcagcggccgataccgcacaccctgcggaaaacccgctgcctacactgcggaaaaacaccgctcacaaagcggacgccaacttgctaaaacacactcgagatcctcgaatccaccggaggcacggaccgggccggggtatgtctggccgcggcacgccacgcctcgggcctgggacccgtggcctacgacgaccccgtggacctgagcgaatacgacatcgcctacaccaaggaggacgagtgaaccagaagaacggacggaccgaccccggcccgctgcgcgagcgggcgaggagcctgttcatctcgcaggccaccatcgacgaaacgctcgaatgggccacgccccgccagctcgccgcgatagaccgcatgctcgccacggaactggccaacagggaggcgtccaaacgggcaaggctcatgcgccaggcccggttcccggtgcccaagagcctcgacggctacgacttcgcgaacgtgcgcctgcccgacggatacaccaaggagcagctgaccggcctcgatttcgcggccaaggcgcaggacctcgtgttctacggaaagacgggacgcggaaagacccacctggccaccgccttgggcatgatcgccatcgagcaaggcaggagcgtgaggttccggcagaccgcggagctcgtgctccagctcggcaaggccaaacgcgacggcgccctcgacagcctgctcagggacctcgcccgtgccgacctgatcatcctcgacgagttcggctacgtgcccttcgacatcgacggggcccgtctcctctaccagatcatcgccggcagctacgagcggcgcagcatcatccttcaccacgaacatcgagttcagcaaatgggggacgatcttcgccgacgacaaactcgccgccgcgatcatcgaccgcatcgtccaccacggacgcctcatcgagttcaccggccccagccgacgcgtcagccaggccctcatgttcggcaagacggacaaccagtaaaacaaaccaccggccggcactcctcatgccgaaaaccgaaaaaaattagtgacgaaacacgaaacaccgacttgactaaaaacatccaggagatcaacgacaccccccatgaaggtcccggactgggaaacgcccaacgaggcttggtaccgcgagctcggcaagctaatgtcgaggacaagccacccaaagacgagcattgcacttacaaattgaatccgggccagccactcgccaacaacgtatcggtccattatatgtcagcaacattctgaactatcatgaaccatcaagtacaactaactactgagaaaatccaatcttgcgagaggaaattatgcggcggtgatgctatttctgatcatcgtgcgccattgaacgcggctaataggagaaacagtctggaattgtaaagacctcaggatcgtaagggcctctctgtccagggtcaacaaactacaaattctgcgatcctgtatcatacaatcaaagttaattcgttctaaaccataatgatcgaacaatctctgtaacaaaccgccccaccggctaagcatctctatcaggttgctcggcgacgccatattccacacagtcatatatcttttatccgaatacagaggtatgcactgtgaagctctgactatttccgccttctttatgcccgtttctttggaggcatccgctatatgccaaacatatgcgtatggcggatcatgcaggatacatcggattagctccaacatatcataaaggcgtttcttggaccctttatcgcattccagagccgcgctagcgaacccagatctttcaccaccttcacaatgtataatccgaagctcatgtctttcggtatccactttgggccagctccgattggctttcatcaaaaggtttagaccgtcaataatctcattgatacagaactcagacacatccttcgtcaaatcactgagcactcgtatatgaatatcgcaatccgtcttctccgtgaatatatgattcacccaacgcgcgccagttatcttatactcagagaaacgaagcatacaatcatctatatttcttcgtgcactactcaactgagcgagcatctttaattcatctaatccaatgcggcaatgagtgcttccacaactaaattgtattgtcgatatcccatatttgggaaatacataacacaagcggtcagaccaagattgaaagcgagcgaaagtgccaggaggcaatgacctagcaccaacgtcacctccaacttcaagaggacagcagccaacccctctcccattctcatcctgcagatcaagaccattactctcatttagatagctttgaaacgcatagcacaaagacatcaaaatggcgatggccgcacggtcataagcagattgaaaatcagcagtcgcctttccgttcacatcggcctgcaacacgcagcaatcagcaacatattcattcgcgctgtcagaaggacgaagattaaactgacatagggccacaccaaaatgctccatatatgtcaggtgctcaaaatacttctctattgcaacaccgatttcgccataaagcgttcgcgcaagctcaatgggaattcttttaccttcatcccggattacgttcatggtcacggacacggctaatcaactccttcattaggcaatcagcagctgcagaatcaaacactgtccgagcatcgaccgaatccgattactgtgacctctccgcccgaatcaatttggccatcgaacatcatgccccaaacaatcatggcatcaggttgaacgcaggcacgtatctcatccacagcacgcgttactttctggagtttttcatgagccgaacaagcgaaagagatacagacggcgttcatcatcttcaacgaatcatctgagaatgatgccattgcgcgcttcgcggcctcaactattccatccgtaccttctgcttggccagcgccggaccaagccagatcgttgccgtccatcgcctctttgatatcggaccaatcaacatgtatgtacgaagaattcatatcagatatagcatccaatacccgaaaaccagcgtttaactttttcgccatctgcaactcttgcttgtccattctgactccttatcgagagctatcgatactcctcacaatatgcacgacaagcaatcaacagtagatatctaccggaatattgaaggtgaacaagccactaacgtttagctgaaaacgagtaagttaccgaggccccagcattggtcacgaaatgtgaataatcctgtgtccaatgagccctacaagccatcgccgtactacagcatatccagaatagcgatgctctagggcctcggcgtagagggcttgttgttgggaatattcggtgcggagtcgttgagaccaatcattgactgtttcacccgtgcgcattttgtcggttttgtagtcgaagagggtgattgtcttggcgtctggatcaaggaaatagccgtctatgatgcctcggaccactattgtgccgtcacaccgcccggcaacattggcgctgtcattcttcatgttgggcacgccaccagccatgccgctaccgttcaccttggcattaagccggttacgttcaatcaacatcgagaatggctcttcccggaacagagcatcccggtgagctcgtatttgcgccgatagcgggcaattttctccagtgacaaaccagagcaagccttccaactcgcgcgtcagcacgatatgggccacttgcggcgtgatgacacgattcgcttccaaacgcccaacgatgctcctcagctcggcttcgcactgctcacggaacggctcggtatcccaatcaaagagctccagcacattgtggaccgcagtacccacctccgaagcagatggctcaacgtcggataccttcttcataaagtcaggaataaagaacccactatgcgcttcccgcctttgcttccaatcatctagattgtcttccagcatggcaattggcgcagccgcgtcatcagacggcaatacagccagcgaatcagtgtcatcagatatagattccgcatcatcaatcatccagctgcgagccttggaggaactcactaccactggcatgcgcggaggctcatcaggcaatcgcaaaccagtcacatcaatacgtttattgatatagccatacccgtccgttcgctcattcatagtggtcgtcggctcaggcgcagcactgcagaatcgaatcgtaatggccctgcccgtcgccgccatagccggcgctgtttcctgtagtcccgcagcaagattccacgcacggacctcattagggcgaagaatcgcagacgaatcatcatccgcatctccagacgccagcaatgatcctagaatccaatagagataattggggctaccactattcttgaccaccgttcgtggatctatggtgcgtccatcgccgcttagcgcgatgccttgagccatcgtacgcaaattcagattgccatcatcgttctttcctggacggtacgatcccgcgataatcaacttgcgttcggcacgagtcatcgccacatagagcaaacgaagttcctctgccgcctccaactccttggcccgcgaatcaatcactgcgcgctggaaagtatccactcgaacatggttacgttggtcaaccaacgataaggcaccttcgccatattcggcaacagccccatcctcattccttgtctgatgagcaatcgtgcgaacgacagcggttctcgatccggtcagcagattattgctggcacccatgagtatcacgacgggccattgcaatcccttggatttatgaatcgtcatgatatgcacggcgtttttggtaggcactgttgaagcttcttcaccggagccactcgcggaccacattgtcacggcatcaaggaatggttgcaatccacgctcctgagctacagcaaatgcatcagccttttctacaagcaagcgcaggttcgcctgccgtcgctcaccttcaggcatattgcctgcgaaatcgaacaagccagaaacggcatagagatgccacaacgaatcagacagagagtgaactcgcgcataatcgcatgcggcatcatagattcgcaggaatgccgatatctttgcaagcaacacatcagaagaaagaacagccgattcatcagcttctcccccactctcagcaatccgccgcataacgtcaaatagccagcctctgttatgcagacgaatccgcgccaaatcatcatccgtgaaccccatagtccgtagcaccgcaaccaacggcacatcctgatgacgattggcgataatacgcaaccaatccaaggcgatctgtatctccggctgacgatacaggtctccaacgccctgtacttcgactggaatgccgacacgatatagtcggtcagccaggtcggcaaaatgagtagcgccacgagccagcaccgcgatatccccatatgaatactgcgcgcgaggcccctcgcagagctcctggacacggcgcactatcatgtccacctgtaattcgtccttgccggcgcgaactgtcggtgcagtgtcagtgccgttttcatcagccacaacatcagcactcaagtcaggtgccgcgttactcaccaacaattcaatggcttctgcatcgaatggtttaccggcttgctttgccgagccgatttgcaactgttccttcaggtaatcggtcgcacccatattcggcgtcatcagtcgggcaaataccgtattcacaaaagtgatgatttccggcaccgatcgatagttcacccacaattcccggcgatggctcgcatccgtaacactattgcagatatcgccgaactcctccggcgaggcatcacggaacccataaatgctttgcttcacatcaccgaccatggtaagtttggctgcatctcggctgatttcgcgaatgaatcgattctgcagggcgttattatcctggcattcatccacataaatatatcgccactgagcaccgatacgcttggccacgtcaggctgctgcatggcatccaatgcccagaaagccacatcactgaactccgctacggactcctgctgtttcacaagcgcatactgctggtcgaacgtggtgatgagcgcaatcaatccttcgagtcttcgcgcagcgacctcatcaagcgagtccacttgttcagcggtaaaggccagtttcgattgcaaatcagaaacgatccctttaatgccccgcaccgtttccgccaagcgacggcccagttcactgtctttgggtacggcgattgccgtactcttaagaatggcagttttgccgacagtaatgcgcttgggcagtacgtccaatggattggcatcgataacacgagcacgaactgcattccatgattcgctacgcaagtactgaggcaaatcgcatatcatccgcaatgatttgactaccgtatcttgctgcgcggtgtgcgcatcgtggcagctggcgagcgcctcatcaagacacgatcgcaattcggcaagaggatgttctgccatatcaatccagcctcgaaaataacggtccaaatattcattgccgtattcaccaccaacgacctgattcagcgacgcaatgttgaaccggtatggttcggcgagccggctaagccaaccgatgcggttgggcttggtgagtgccttgtcatacaggctcatcatggtggcgcgcaagtcaccatcatgccggggcccttgcatgttgtccaacacatccatgaaccgcgcgtgcattgagttgcgctcgtcataccacgattcgaataacgcgtcgagtgtttggcctctcagccggttcttcatggcatcatcagcaagaatctggaatcctggagccaccggcaatgtatcggcattgcgatccacgattcttttggagagcgcatcaatagtgctgatttgcacggttggcagatcgttcaaggcaacggagaatacggtttgcgcatggtggcaatcgtgcagaatcgtacgcgccagttcgctgtcgtctccacctaattgatagtccgtatccaagagcacgagtgaacccggctggcatccatgattgcgccgcgcatacagaatggcgtactgcaggttctgttccaagcgccggcgaatttctgcggctgcggcaacggtgaaagtaataattaacgattcgcggatggatgaatgcgcttcgtctgcattacggttcagcaagtccagcagaatatcctgcaagagttgagtggttttgccggtgcctgcggatgcgctgatgacgtaaggcatggtgtttgtcggaaaatcgtccgagagattatccgcatcttccgacctaggtaatgcatcaacatgttctaccatgccttgcctccttcagatgtattattcatatgaagagccgcttctttgagctccagcaatgtcactgctgtctccacctcgaatatgttgctattcagcacatcccacgccatgatgtcggccacatcgctgtaggcaagaccatcacggccgtcaaccaaagaacgataagggcgcaccggcagtttgccgtccaatatgttctggcaggcacccactattttcccgtgcacataatccgctatgccacgaaattcttccgcactcagttgttcgataccgatgccggtttcgtcggattctcctataagcacgccactgttcggcatatcaaagcctcgccatacgtttctgatgcgcatgttctgagcacttgaatcgtcacttggctcatcgaacagactcgttgatccatcgtctgcgctcggcaacatgttgtattggttattcagcgcgatgcgttctcgaatggttgcgctgggtttaatcgggagaaagaacatgcctgctactggcattccggagttgtgctgggcggcagaagcatacgtaaacagctgaagttcatggccgtagtacacatttgaagcgcggccgccatcattgcgagacggtttgccgaacaacgtacgggcagaagacttatagtccagcacaacaatgccggcgctctctcgcgaaatattggtatcgcgaattaccgtatcaatgcggtcgaccttgccattgatacgcaatgcaaccgggatttccttgtccctcgccctaccgattaattgttcccctgaatatggcgactgccatgcaccggtcgttcctccaacgttgccaaatacttgctctacacacgtaggcgtaagcatcgtctgtgcggacgataatgcctcacgttgcgcagcggcatcgacggcaaaatccatcagcgtatcgaccagctgacgatgaatcatacgcatacgattactggaccgcagcacctccatacgcgggtcttcgttcagcaccgtccactgattgcagcctcgatccagtctggaatagtcggcgataagctcttgcatgtctgttgcagtgggctgaggtggtaagccattcaaatctcgttcgttcttgtgtcgctcgatccaggcattgaccgcatgttccagcactgaatgatagaacgtgccttcaagcgcggcatcaaaagcgaacgcatttgccacgttaactttcaatccgtatttcaggaaatactcatacggattgcgatagtacgtttctattgccgaaaccgatgcattgaacacacgagtcgagatcgaaggatctgcaccatgagtgcgataaacgcgatgcgcataatccggcctagtgaacaaccgatatgccagttcgcggtcaaggggacgatactctgtttcaacggtcggcacagcgcgtttgctcgctccgatgatttcgctcgtatccgatgtacccgtctcccattggctgatatatggcgagcatgcttgtgcagcgttacgcagactctttggataggtcatagacaactgctgcgttgcgctggcaacaacaccgttaaaccatagcggttcttgcccggacctacgttccaccgtaccggaaagtacattccacgcttccaaagtcttgccttgggaagtcaggaactgtgacaaatccagccgctcgccgtcatcgagcagaccggtctcatgcggaatcgcaggcaattgagattcactgcaacccagaacaatcacatatctgtatggatgtaaaggcgatgacatcggcaatacgtccacggcgctggcggagaccggacgcgaatcgattgactgcgcggcgagcgtcgaagctagatttctagcaaagattcctacatattcagcaaaataatcgttaccgagctgttgaaccatgtcgtcaaacgcattcatgatgacggtccaaactggcgcggatccttcaatgggttgggcgtattcggtaagaaaaccaaccatcctgcctagagcctcccgcacggttgcgctaggccgcggccgaaacacatcagcggcttgctgaaccagcgaacgaatcttctgcaaatgtgcagcgaacggtatgtctgtatcgatccataccgttgccggattgttggagttcagctgattttcaatgtcatcgattgccgttggagtcaagttcagataccggctgaagataccggaacgcagtatgcgcaggatggaccggggttgaagttcgtaggtcgcggaatcaagcagtcccagaatcgcatcagcgaacggatggtcaagcatcgtactggacgcggcaatattaatcggtatcccctgatacgtgaattccgatgcaatttgggcttgatatgaaccaaggtctcgtgaggcgaccagcacatcaccgtatgaaatttctggattgtccgcgatgaacttcttgatggacgctgccacatagcgcacttcggcagtagtatccggcatcgcacacactgatgtagaagcggatgaagcgaaaacactggacagcgtatttcggtttccatcatcgcgtctctgcaatgcttccagataatccggatcagagccggcaccaaccatcaccgtcagatgcacgtattgcgcaagtgtatgaactatcctcatctccgaagcgttgaggtgtgcgaaaccgtacagatagaaccagcgattactcccatgccgctgtgcccatgcacatatggtttcatgggcggctccggggaatgtatactgtttacctaaccgttgctccaccagttgcagcaaagagccaagcaccgaaagtcgagcattcgactgatgagcggccagagcaagcacctcttcagcactgaccccatcattatgcaattcaacaatttgcttggtgaactggtcaatcgcctcaaacgagtcaccaacctgattacgcaacgattcattatcattcagacacttcgctacgtaatttctcagcgacatcatgctgattgatgggcgaatgtaccttccataatcctggttgccgataatcgagctcatcatgcttgccagagaatggacacccacattcatccccggttccagacgttcgcggaattccggtcggaccatcgaccgcagtacttgcttttccacatatgcgcgcaagcttgccggtgtcagaataacgaatcgtccacggcaactatccggaaaatctgcttccgtacatccggcaccatcagaaaggacatgatcaatcagggcatgaatgtcatcacaccctcgctcgggccgtatcaccatgacactcataccttaccctccccagtgagttgtatctgttctcagcatataactgacgcaacaaatatctgggacttcgcgcatgacactttgcactcttacgcaagcctagtgatttcgtagtatcacattgccgtctaagcacacacatattgttcaatcgcacgtcctattggccatttgaaagactcacactggagctgttgccgagtggtttgatcccaatccgaaccattagggacgacttcatctgtactcttttgcgcacaaggacttgcatccattacatcctgcaataaatcaccctgtccatgggattgtgctgctctgtattgcctttccgcctcgataaggtcactgccacattgggcaagagccttcctgcaggggttgacgcaatcaaaagcaccggctctaatgaggtaattgacattccctgcattgcaatgttccaatgaaacacgacgtataaaatcattaaaactgcgataggcactgcccttattacgggttgaaacgatttcttctgccaattgttccgaaatgccccgtatcgcattaaaaccgagctgaattccatatgccgatttctcatcgtcaccggtactggaatacgctgtcgcataatattgagattgattaatgtttggcattcttacatgaatacctaaacagtacatttcttcaaatatactttccagtttcgccctagcgccatcctcgttataactattcaacattgcggtcatgaattcgattgtgtataacgttttcacataggcgacacagtatgcgaacattgcacgagcaacagcatctgcgcggtcggcacctctgctatggcatatgtcaattagctccgcaaaagaggtaagcttctgctgcatcagttcgctcttcattccatccaagaatggaataccggccgtatagcccgcggacagtaagtcatacacacggctctcatccaacgaactgcaagaatcatcccatacttgcggcacattgcaatccggtatgaatcgaagggtatcctgcaccacctgcaaaactctcgaacctgcaatacggagacgaggaagcccaagttcatcacagccttttgcatcaaacgcggtgctttctgcccccgaaggaaaacgaacaatggacgttacttcggcaaggggcttgttgcaaagagccaacacatcactgcgaacggaacagtcatatatacagtctttcaacccatccgcaatagacttcttggcgttatcctgcaaccaaacctcagccgaggatacatcccagaaccgttgatatccgcatacatgcgacacatctttcactgccttggcatcgttaaaacggttgtatgcaattacagcagctgcataaccattcccatatcggtcacatagatattgcaatacccgcccggacagtccccgttccgtttgcaaaacagctgtaggaaagactgaatcttgaaaatcagtaaagggtaaatcgtattcgatgggatcaatttcactaatccccagcgcataggcgacaaggctgcgagccaatatccctttcccaggcccgaccaaatgcccttcttctcgcaatcgattcgtacaatatgcgacggccatcaagtattcttcagcatgggtttcacgaatcacagccatttcgtgttgagcacgattccacactgaatccggtatgcttccatacttcgcttgcagccatccttcaacttccccttgaagaatttcactcgacgctcggccatcagcaccaacatgctgcggcatgaatgagccatcttccgctacacaaaatccggtatcgcaccgctctgctatgagcaacgtattgtcgcaggcttcaggcacatcggagaacagagaccgcataaccgcagatgaacgcaaataatactcctcgctttcaaacttgaaacgatgaggactatccatcacatcacctgtttcaatgcatatacgcacatcatgttttagactgtcatcacgctttgcataatgcacatcactagttgcgactaacggcgcattaattcgtttcgccagttccactagatcattcctgatttggtgctcaatggacaaaccatgatccatgatttctataaagaaattatctcgaccgaaaatatcctgtagttcaccggccattcgcaacgcttcatcaaattgtccaagcaacaatcttgtcggaatggctccagacatgcagcccgacccacaaataagtccttttgcaaatgatgacaagacattgttatccatgcgaggataacgcgagaccagaccttcgagattcgccacggaagatgctttcatgagattgacaagaccttcatcggactctgcccatagcgtcaagtgagtaaacagcccaccaccgctgacatcataaggattatgaggcacacaagtaacacttcttcgagtattcctctctttccacgaattatcccaagatacgcatctcgtatccgtgcggccagtttctggcgttacgtatgcttcaacacccaaaatcggcttaatgcctcgctgacgtcctgctttccagaactccatcaaaccgccgacactgccgtgatcagtcagaccaattgctggctgacctaatcgttgcgcttcactcatcagctcgctcacagtagagacaccatctgccagcgaatagtcactatgtacatgcaaattaacgaaatcccgcataagagcaccgcctccatagtcatggttgcttcgaattcgaatcggctgcatgttcagtttcctgccgcgctacaatcaacggtaattatctactggttcttgaagcagtctcgatactcagcgagaggaacatgatggccgtctcatcgcaacaagcaacaccttccactgcgcagattgtcatcgagattctcgaactgctggatgcgcatacagaccgcgagcacgggattactgccactgagatcagcaagcgcattggtgtttcggaaaagaccgtacgagggcatctcaaggcgttgcgtgacatgcaaccattcggccgtcgggtggagcatctggagcgtcgagacctgctctctgctgaaagcgctgacccaaagccgggatggtacattgaaccggtgtttgatacggcccagatgcgtctgcttgcggacggcgcggtaatatcacggtctgacagcgaatatctgagcgaccttatcgccaaaatctatacgttcgcgggcaagtcgggccaattacgcggtctgaggcagctcactacaccaaagaattacaacaccgagtttcttaacaatatcgaaatgctcaacgatgccatcgaacacgaacgagtaattcgattccgttactgcacctatgacattgatggcaatctggtccctcgccgcgacaatgcgggtgaaatcaaagaataccaagccgatccgtaccatctgatgtacaagaacaacaaatactatctgatttgccacatgcatcagcatgacagtctctcgtatctgcacgtagaacgtttccgcaacctttgcgtcgaggagactgatcatgcgctcaatcgctcactggatagcttcagtccgattccgggaacgccgttcaacatcgaagagcatatggacgaacgcccttaccccatggatggcgcagcagtaccgattcacctgcgtattaccggcacgctggagcccttgtacgactggttcgacaacgccaaggtcgctcaaatcagcgccaacgaatacgacgtgcatatcatggccaacgaattagcgaccttgtggtgggcattgcaatatgccgattcgcgccttatcgaaatacttgaaccacaatccttgcgcattatgctgcgagatactggcgaatctttgctagaaaagtatcgagactagctagtcccgctatattctcaccaacgctcagctcttttgtcggcactcggcaatgagggcggcacagagcaaaatgacctgggcgacgaggttgaaccaaatgagcacgccgatcaacgcggcgaacggggcaagcatcggattccgggaggctccggctaatagtcgcgcaccgagaagctgcattgcggaaaccgtcagagatcccagtaacgcgccgagtatcgtgaatcgtccggctttgatgtgggagaccacgcgcagcagcaacatgaacaacgcaaaattcagcgcgacgccggtaccgaaaccggtcatctccaaaagcacggtgccgggcaacgaactgctggggatgccgccccattgcagcagtcggcgtacgatgccgccggacaccgtaccggccgcggtcgaaagaatgaacagtattgcgatggcgatggcggcaagcgtatcgcgtaaccttgcgacgacgatattgagctcgtcgccgcagtcgtcgaacatggcccgtacggcgtggcgcagcgagttcatccagccggtcaccgtccaccagaatatggccaacgtggccagaccggtccatgtcaatgcgcttgacatggcgcctagcgcggaagacgtcagaaacgagtcggccacaccgggaatgacttcacgcaccgcgtcgatcagcatctgctgccaatcaatgttgccgaccatgataaggccgaacacgctcaccgcaatccagacgccggcaaaaaaggcgaacagcagaccatatgccagaccattcgccagcagggggccgctccgcgacacataccggtcgagcacgcgcccaggcagcgaacgcgcccacgcgtccgctcccctgtcaatcgcactcttcaacccatacatagttcaactgtagccgttgtcaccgttgttgaaacagcatggcgcgaaatcgcatttagccagctcaaacgatggcaaccatcaacgcccccactcaattgttcagaatcggataccatatgagtattcaattcatccgtcggagtgcaatgtcagcagtcctcgccaactgatgtcttgctaacccgctggccgccctagtacctactgtttcttgtggtcttcgttcaacagccagtcaagcgcgtatacctgtcggatgccttcgtgggagtagggccgttcgtcatccagcgtaatcagcgtcttgggatagttgtcacgcacggcgcgcagcgaggacagctcccgatccagcgtcgccgaatcgtgcaccgattcgctgacctgatagtaccgacgcccgcctggcccgttcgtgacgaagtcgatctcgccgccggagctctgtccgacatacacgtcgccctcgcggcgcatcagttcgaggaacaccacgttctcgatgaggcgtccggtgtcccgcaccttgttggaacacaggatacgtcgcatccctaagtccacggcatagtacttcttctcctgcttgaggatcctcttgcccttgatgtcgtatcggtgggccgggtagaggatgaacgcgtcgtaggccgcgatcgtcgtcggaacgggcacggtcaacgactaggaaacggtttttatcagcaggagattctgcaatccggatggtatataccgcccggcttcattactgctttggctcatttctgttcacttcacgctggagtaccgagacacgttgagcggaaataccggtgattcacgtacggttaccgaccattggactgaatggtactcagcatccgcagtcacttggggtatggtcatgacggagagccatcatgaccgatctctcgttattctgggatgaatccggcgaagccggaactgaatctaaatattaaaacgcatgatgcacacgttgcggaattagtccaccagaacttcggcatattcggcaggttcagcgggttcgatatgtcgggcacgcatggcatcgagggcggcagccaagtcggccgggtactgggaccggaccgtggtccagacgcgggtgcggggatgacggaattcgagcttcatggcgtgcagccactgccggtcaagtcccaaggcctcagacagcaccggattggcaccatacatggggtcaccgcacaggggatgcccaatcgaggagaaatgcacgcgaatctgatgagtacgtccggtctccagattcacggataccagagtggcctcatggccgaaacgctccagcacatcccagtgcgtaacggccggtttgccggccggagtcacgcagaagcggaaatcggacactttggcgcgcccgatcggtgcctcaatggttgctttgttctctttaagaccaccctgcacgagcgcatgataggttttctttacctcatgctcggcgaactgccgacgcatctcggtgtacgcaaggtcggacttgcacaccaacatcaagccggaagtgcctacatcaaggcgagaaacaatgccctcacgcccggccgcaccataggaagtgatatgcacgccgcggtcacgcagtgatccgagcacggttggaccggtccagccaaccgaggcatgcgccgccacgcctacaggcttatcgactacaacgacatcatcgtcttcgtagacaacggccatatcagttgcgataggctcaggctcggcctgttcctccgccaaatcaaattcgacggtctcccccgcctgcaatgtgctggaccgcgcaacttcacgtcctaaaacgcgcgcctgcccggagtcaaccagatcggcggctttagatcgtgaaatacccagcattttggccacggctacgtcgaaacgcttacccaccaatgcatcgggagcagggactattcgactcattacttggcgtccgcctccggctcagactgtagggattcgtcggattgctcgatgagatccttgtgtgagaacggctcccccataagaatcagaatcaccaggaccacaccggcgactaccagatagatatccgccacattgccaacggaccagccatagttaaggaaatccaccactttgccgtcgaggaagccgtcagcgtacataacacggtcaatcaggttgcccagagcgcctgcaaacgcgaaagaaatcgccaccgaccatttcatggagacagtgcgcaccccagccacagcaagggccacgcaagccacaacggccaacagactgattacccaagtagcgcctgatcccatgcccaaggacgcgcccggattacgcaccaaggtgaaggacagcagtccgggaatcacgcgaatggtctgaccgttggataacgcggccatcgcccaagccttggtgagctgatcgacaatcagcgcagccgcggccacacatgcaaagacggccacgcgggtgcgcagccgtccctgttggttcgtcatacgacctgtacctgcctacgctcagttggtcttggacgaggtctggtcgacgtagttgttcgactcggaaacctgcgatgccagctggccgaggtactcggtgaggcgggcgcggtattcagtttcgaactgcttgaggctctggatgttgccctcgacgaccttggactgagcctgaaggttgtcgcgcacctgctcggcatacgtatcggctgcagagcgggtgttcttgtcgtacgcatcagccgcggaacgagtgttcttgtcatactcggcggcacgctgctgcacttccttctcgtagttgtcagcgtcatcgtgctgagacttggagtagttgtccgcatcctgacgagtcttgacggagtatgcgtcggcctcagaacgggtgttctgggagtaggtctcggcatccgcgtgagtctggtcacggtaagcgtcggcctcggagcgggtacgatccgaataggtgtcggcgtcggaacgagtacgagtggagtagtcgtcggcctcggaacgggtacgctcggagtagttgttggccttggtgaccagatcgttgtacttgttctggctggcctcgatgatttccttggccttgttcttgcccttctccacgtactgatcgtgcagctgcatagccagggtcagcatggcggtggcgcgctcgggctcggtgcccggcatggaagcggcgccagcgatcttctgcagagaaccggtctcggtgctcggctcgaccttagagacctgagcacgaagctggttttcacgctgcttggcttcttcgagctgacgggacagctcagcgatctgagcggactgctgctgagcggcggaaccctgctgctgagcagaggcgagctgacgggacagctcctcgttggccgcgcggaactgatcacgttcctgctgaatggcggcgatctgctgaccgacagcctcctggtcaccggaggcctgagcagcctgagcggtgagctgatcgatttgagcgttcagctgatcgacctgacccttgagctgctcattctgggaggacagcgcgcggttggattcctcggcttcgctgagcttggcagagacaagctgtgctgcctgatcattgccagcctgagcggcctgctgggcctgagccacagcgttcttcaaaccagcattctccgactcgagttgctgcacctgaccggtaagatcggagatcttcgcattaaggttggtcacgtcaggacccagagtctgggtggcctgaccgccggctaccgcctgacgtccaagagcctcgacggtttccgtgacctgatcaaggaagtcatcgacctcgtcgacatcataaccttccttgaatcgaacagtctggaaggtatgctccctaatatccttcggcgtcaacagagccataaatcttgcacctcgctttggggcatcgcccgcacttacgttggtctcaagtcagaatgctatcacgaccccatcgtttcagaacattcgacgtgggtttttatgccagatatatgcctccggcgggtcaaaaacggcctcagaacactatcagaacaacactttccagtaccaccagcgcaaaatacagcacaatgaagctgacatcaagataaatcgaaccgagcggcaatgggcgaatatagcgacgtagccagcgcagagggggttcggtaatggaatacacaatattgatcagctgggccaccacaccacgtggataccagtttcgtgcgagaacggagacccagtccagaatcatgcgcacgaacagaaccgtgatatacgcgttaatgagccatgcaagaatgcggccgatcagagagaacactaaggaaagcatgctgacagactaacaaccgcgcatgaaaagtttgctcggagcacaataagaatcggccgactccttgctgggagtcggccgaataccgatataacgtcgaatgcgaaaactactgaaccggtcagtcagcgaacaaatcgtgtgccgaggctggttttgtcggctcttcgaccttgatgttcacctgcgccgggctcaacaggaacacgcgcggagtgacacgctcaagggaaccacgcacgccgaacaccacgccggcggagaagtccacgatgcgatatgccacggcttcggccacaccggtgagattcagtacgaccggaacaccgtcacgcaatgcgcggccgaccagttgagcatcctcatatgacttcggatggatggtggtgattctgttcacacggccaccggggaacggcttggtagtcgacgatgcggcaggcgcggtggttgacgccagcggcgtgaccgtatggtcggaatcaaatgcggacttcgaagccggcttctgctcctcgtcctcctcgatgtagtcgtcctcatcgtccacaacgtcactcatgcccagataggacatcgcgtttttcatgaacccagccatggatcaatcctttcagcgcaggaagtcagggatgtcgagatcgccagccggatcgttcacggcgatattcggatgagcggaagtcggatcatcaaaaggcaacgatgcggagtcaccgatagccggtgtgaatgccggttgggcagtggcagcgggctgtgcagccggtgccggtgctggagctggctgtgccacgggagtcgcaggatcggcggcggttggcacaaccggcgtcaccgtgctctgagtgtcgtcatcttgagcggcgacggggtcaaaaccagcagcaataacagtgacacgcacttcatcgccataagcatcgtccagagcaagaccccaaataatctgggcttcagggtgaatggccttgcgcaccagttcggtggcagcagaggcctcctgcaacttcaggtcggtcggaccggcgatgttgatcagcgcaccgtgtgcgccttcgatgctttcctcaagcagcggagagctgatggcgatttcggcggcctgcgtggcacgatcctctccccgtgcggaaccgataccaaacagcgcagtaccagcaccacgaagaatggagttcacatcgttgaagtcgacatgaatataggagttcatcgaaatcaggtcagtgatgccctgaacaccggcaagcagtgcggtatcagcggtcttgaaggcctcaatgatgccgatggaacggtcggaaagctcgagcaggcgatcgttcggaatgacgatcagcgcgtcgacttccttgcgcaggttgtcgatgccgtattcggcggaagcggaacgctgagggccttcgaagctgaacggacgagtaacaaccgcgatggtgagagcaccctgttgatgagccgcacgagcgacgatcgggctggcgccagtaccggtgccaccgccctcgccgcaggtgacgaacaccatgtcggcacccctaagcgcctcttcgatatccgactggtggtcctgggccgccttggctccacgctccgggtcggcaccagcaccgagaccacgactggacttatcggaaagggaaatcttgacatccgcatcagagcgcagaagatccttcgcatcggtatttaccgccacaaattcaacattctgtaatccctcggcaatcatgcgattgacggcattaccgccggcaccgccgacgccaacaaccttgatgttggtcttgtcgttgaactcattctgcgcgatctcgctcacgtttggctcctgtcacttcacggttacacccaagagtagcgcaaacaggctactcttggagggaaattcacgcgcagaatggcgcgtgttgcgtgtattttcagtattttctcagtaactggcgtccattgggtcgtcaccgaagagcgcctcacgctcttcgtgggtggtggtacgcgattccaaccagccatacggcaagtgcaccttcttggcgaaacgcacgcggccgcgcggtttgtcgaccacgcgtggcgggtattcgatagtcgggtcgagcttgccgatctcgcggtccacatcggccaggctctcgcattccataaaggccttgcgggtggacccgcccaccgggaatcctttcagataccaggcgatgtgcttgcgcaaatcgtggacggccatcatctcatcgccctcataaaactcggtaagcagctcggcatgacggtgaatcacccggcagacctcgcccagattcgggttgagccgttcgggattgccctcgaaggcgtttttgatgttggcgaacagccacggccggccctggcatccgcggccgatggccacaccgtcgcagccggtctcgcgcaccatttcgagcgcatcctcggcaccccagatatcgccattgccgaataccggaatgttgaggtgttccttgagctcgccgatgcgggaccagtcggaatgaccgccatagtattcggcggtggtgcgggcatgcagggttacggccttgcagccctcctcctgcgcgatgtgcccggcttcgaggaaggtctcatggttatggtcgatgccgacgcggatcttcgcggtgacggggatgcccgccggctcgcatacggcgaccacgcgctggatgagctcggtgaagatgtcggttttccaaggcaaggccgaaccaccgcctcgacgagtgaccttgggcaccgggcagccgaagttcagatccacatggtcggccatgttgccgtcgaccacgattttcgccgcctgttcggtgatggaggggttcacgccgtacaactgcagtgaacggattttttcgcttttggcgaaatgacagaggcgcagtgctttcgggttatgcgccacgagggctcgagcggtgatcatctcggccacgtagagtccatcgggaccgtattcctcgcagatcacgcggaagggccagttggtcactcccgccatcggcgagagcaccaccggggtcggcacggtgatgttgccgagttggaccggggcgatatgcaccggggtcccggggcgcgccggcgcgtccgtacgtgggtcgaggttgtcggtctcgtgatgctcggtgagcactgtttcggattcggattgtgccatgtgattcctaagaaaataagtaggggctcccctgagagaggagccccggcgtctatcgccgccacttcgcctacaaacagcccactgggatgtcttccttacggctcagcccacagaggggagcccaagttgtgcgactccggcttagtacaggccgccggcttcctgaacgccggactcaggccaaggctcaccgcccatttccacaggcttcaggggcacgcgggtgcgcttctcgccgatgcgggcggccacgtaatcggccaccttgtcaagagcgacgcgctcctgggccatggtgtcacgctcacggatggtcacagcgtggtcctcgagggtgtcgaagtccacggtgatgcacagcggggtgccgatctcgtcctgacgacggtaacgacgaccgatggcaccggactcgtcgtagtcgatcatccactcgttgaagcgcaggtcgtcggccaggttctgggccacggtctgcagttcaggcttcttgctcagcggcagcacggcggccttgaccggggccagacgcgggtcgagacgcagcacggtgcgcttgtcaacgccgcccttggtgttcggggcctcgtccacatcgtaggcgtccacgaggaagcacatcagggagcgggtcaggccggcggccggttcgatgacgtacggcacgtacttctcgccggtggcctggttgaagtagctcaggtcttcgccggagtgcttggagtgcgcgctcaaatcgtaatcggtacggttggcgatgccttcgagttcgccccagtcggaaccctggaagccgaacttgtattcgatgtccacggtgcgcttggagtagtgggagagcttctccttcggatgctcgtagtggcgcaggttctccggcttgacgccgaggtcgatgtaccagcgggtgcgggcgtcgatccagtactggtgccattcctcatcggtgccgggcgtgacgaagaactccatctccatctgctcgaactcacgggtgcggaagatgaagttacccggggtgatctcgttacggaaggacttacccatgttggcgatgccgaacggcggcctggaacgggaagaggtcatcacgttcttgaagtccacgaagatgccctgtgcagtctccggacgcaggtagtgcaggctgttctcgtcctcgaccgggccgaggtgggtgcgcagcatcatgttgaagtcgcgcggttcggtccactggccacgggtgccgcagttcgggcagacgatgtccttcatgccgttttccggcatcttgtcgccgtgcttctcggcgtaggattcctcgagcttgtcggcgcggttgcgcttgtggcagttgagacactcgacgagcggatcgttgaacacgctcacgtggccggacgccacccacacttcgggcggcagaatgatggaagtgtcgacaccgacgacatcaggacgggtgacgaccatggagcgccaccattcacgcttgatattgtccttgagagcgacgccgagggggccgtaatcccaagcggaacgggtgccgccgtaaatttcgccggcggggaacacgaagccgcgacgcttcgcaagggatacgacttcatcgagtttggactgagccacaatgcaccttctggtttgaacggtttggggtctaataacaaccgcttcaggatagccgtatatggtgacaggtcaggcggcattgtccggtatatgttccgcgtctcacgagcggccgttcgcagcgattcctatatcgcaacacctccatattgctcctgttgttttacccttcccgaatttgtgccactgacatcgcgtcagcgtcacaaattcgggagatgttgctcggcggaggcgtctatgtatcacgaatggacggggacgcgccagacctgacgacacgtatcgaacaaatccgtcacgataatgtccatgttggcgcatagcgtcggcactgtaatgcaggggaactcgcatgtggttcgcgagttgagaaaggcctgagcctgacccttagaacctgttggttaagaccatcgtagggagcagtaaatgagcaatagtgcatcatcgtttaccggcgtgtccagcggttataccgccgggactccggttccagccgattcacccatccgtgacaatatcgccgatgccgttcgccgcgtacgcgagacgactccgttggcccagtcattcaccaattttgtgaccatcaatttggttgccaacgcgcaactggcggccggcggcactgcggccatgagtttcctgccggacgacgtgatcgaaaccgcgaaaatcgcgggcgcgaactacatcaacgtgggcacgctgctgccgttctataaggacgcactgcccgaaatcgcccagcgactcaactacttggacaagccgtgggtgctcgacccggtggccgccggcatcggccgcacccgtaccgccattcttcaggccttcaaggccgctcccccgaccatgattcgcgcgaatgcatccgaggtaatcgcgctggcgaacatgtgggggctcaataccgaaaccgtgggggacgcttccgagcaccgccccgccggagtggaatccgtcgacgacgtggagtccgcaaccggcgcggcggtggcgctggcacagtatctgaccgaacagcacgccaagcattcctcccatgacgcttccacccgctgcgccgtggccgtgtccggcatcgccgatctggtgaccgatggcgaaaccgtgtaccggctgccgggcggcagcgcgatgatgaccaagatcatcggtgccggctgctcgctgggcggcgtggctgccacgtatttggcggtctccgatccgttgaccgccgccctgtccgcgtctctgctgtacaaccgcgcgggagaggtggccgatacaacttcgcacggaccgggctcgttccaagttgcgttccttgacgcgctgtggaatgtgaccgccgaacaggtggcggaatccgagattttggtgcagtagtttcagttccctctgatgagggagctcataacagttttttccaataagacttccacaagaaacaacaaaagcaggaataataatgagtaatgaatacccatacgcctccatgcgcgacagcttcgacctgtccgcgtacttcgtggtggggccggaggactgcaaaggccgtccgctgaccgacgtggtggatcagtctctgcacggcggcgcaaccttcatccaactgcgcgccaaggaggccgatgcctctgagctgaccgacatggctcgcgacatcgcgcaaatcatcgaggacaatgagaagtccgattccgtggcctttgtgatcgacgaccgtgccgacgtggtgtggcaggcccgccgcaagggcatcaaggtggacggtgtgcacatcggccagaccgacatggagccgcgcgaagcccgcgccctgctcggcgacgaggccatcgtgggcctgtcggctgagaccgaaagcctcgttcggctcatcaacgagctgcccgacggctgcatcgactacattggcgccggtcctctgcacgtctccaccaccaagcccgaggcttccgtgggcggcaacgacggctccggcaagacgctggacgccgcccagatcaacaccatctgcgttgccagcgaattcccggtggtcgtgggcggcggcgtgaccgcagccgatatggccatactcgccgataccaaggctgctggctggttcgcggtctccgccatcgcgggtgccgagaacccggaagaggccgcgcgcaccatggtcgaaggctggaaggccgtccgcggcgacaagaagcacggctacgcgccgcgcgtcgtaacccacacccccgctactgacactcaggctgctcaggaaggggccgcgaagcctggttccgagaccactgagaagaagttcaccaacgccaaggacgccaaggatgcccagaagcttgccaagcagcagcgcgtggacatcgccgcccgtggttccaagcagcgcgacaaggcgcacatccgcaagaccaagtccgtaccgttcacctatcagtatggttcctacgacctggaagtgccgtacaccgaaatcaagctgagcgacacgcccggcgtgggcccgaacccgccgttccacgactacaacaccgaaggccccaagtgcgacccgaaggaaggcttgaagcccctgcgtctcgactggatccgcgaccgcggcgacatcgaagactacgagggccgccgccgcaaccttgaggacgatggcaagcgcgccatcaagcgcggccgcgccaccaaggaatggcgtggacgcaagcatgagccgatgcgtgccaaggaccacccgatcacccagatgtggtacgcccgccacggcatcatcaccccggagatgcagtacgtggccacccgcgagaactgcgatgtggagctcgtgcgctccgagctggccgccggccgcgcggtgatgccctgcaacatcaaccaccccgaggccgagccgatgattatcggatccgccttcctgaccaagctcaacgccaacatgggcaactcggccgtcacctcctccatcgacgaggaagtggagaagctgacgtgggccaccaaatggggcgccgataccgtgatggacctgtccaccggtaacgacatccacaccacccgtgagtggattcttcgcaactcccccgtgccgatcggcaccgtgccgatgtaccaggcccttgaaaaggtcgaggatgatgcctccaagctgagctgggaactgttccgcgacaccgtgatcgaacagtgcgagcaaggtgtggattacatgaccatccacgccggcgtgctgctgcgttacgtgccgctgaccgccaaccgcgtgaccggcatcgtctcccgcggtggctccatcatggccgactggtgcctgcgccaccaccaggagagcttcctgtacacgcacttcgacgagctgtgcgacatcttcgccaagtacgacgtggcgttctctctgggcgatggcctgcgccccggctccctggccgacgcgaacgacgccgcacagctttccgagctcatgactctgggcgagctgaccgagcgcgcctgggccaaggacgtgcaggtgatgatcgaaggcccgggccacgtgccgttcgacaccgtacgcatgaacatcgagctggagaaggccgtgtgccacaacgccccgttctacaccctcggaccgctgaccaccgataccgctccgggttacgatcacatcacctccgctatcggcgccaccgagatcggtcgttacggcaccgctatgctgtgctacgtgaccccgaaggaacacctcggcctgccgaacaaggatgatgtgaagcagggcgtgattgcctacaagatcgcctgccacgccgcagacatcgccaagcaccacccgcacgcgatggatcgcgacaatgcgatttccaaggctcgcttcgagttccgttggctcgaccagttcaatctgtcctacgatccggacaccgccatcgccttccacgacgataccctgcccgccgagccggccaagatggcgcacttctgctcgatgtgcggcccgaagttctgctcgatggccatctcccagaacatccgcaaggcattcggtggcgaggccgctcagcagcaaatcgtgaaggaggctgctgcaggcatcgactccgaggcactggctacggccaaggccaatgtcgataacggcgtggtgtccgccaacgtgctcagccccgaagaaatcctcgccggcatggatgcgatgagcgaaaagtacaccgcccagggcggcaagctctactccaccgcccaggagtaaacctctctggctcccctctctgaggggagccaattattatgcccggtggtgtcttaattcgggacgacgctcgactcgctcgaaggcggtgccgaagtgtgcgccatctggaccgaggccgtcggaagtctccaggaccacgccttcgttgagcgcacggcgcagtacatcgttatcagccatgccccctcccgaacatttcatgaatcaatcgcaatcagcaaaccttccccatctcaccacaggagcggcaaaacatcaaggaaaaccgctccgaaaaacatcatgggccccacttagaatgaacactatggcacaaattgcaacatctacacttcccgctgttctcgcgatctccggctccgactcgtccggcggtgccggcatgcaggccgatctgaagaccatgctggcctgcggcgtgttcggcatgagcgccatcaccgcgctcaccgcacagaacaccaccggcgtgcgttccattcaggacaccaaaccggacattctcgccgaccagatcaacatggtgtttgaggatattccgccggtcgcggtgaaaatcggcatggtgtctgccactgacatcatcgacgtcatcgctgaacgactcaccttccatcacgccacgaacatcgtgctcgacccggttatggtggccacttccggtgccaatctcatcagtgacgatgccactgcggcattgaccggcaagctgttcccgatggccacggtcgtgactccgaacattcccgaggccgaagtgctgaccgatacgctgattcgcgatcaggaggatatggaggccgccgcccaccgcctcgtggagcgttatggctgtgccgcgctggtcaagggtggtcatggcaccgaggatgccaacgatgtgcttgccgagacggatggaaccgtgacctggtttgatggcgtgcgtatcaataatccgaacacgcacggcaccggatgcacgctgagctccgccatcgcctcgtatctggcgcttggcgacacattgcccaaggccatcaagcatgcgaagaagtatctgaccggtgcgttgaaggcccagctgaatcttggccacggctccggcccgatggatcatttctggaagtatcgctgagtcctactggctcccctctctgaggggagccaagtaataaaaggagaattatgattattgaccgtaatgccgttactcaggaagtgccgatcgacccggaaaccggcaaaccgtacctcaataccgtggccgccattcaggtgtcggccaatggcgtgggctccgaggtttcgccatacgtggctcaggccgtcgaggtgattcgcgaatccggcctgccgcaggaaaccaacgccctgttcaccaacgtggaaggcgatctggacgacgtgctcaaggtggccggtgaggccgccaagaagctcgccgagcagggctaccgcacttctctggtgctgcacatggatatccgccccggcttcaccggccagctgaccgaaaagcccaagctggtggatgagatcctcgccgacaagcaggcgaagtagcaaagcatcgcttccaccagcaagggcatgctttgttattacacgtttcatggggcggtagctcacccatggggtggtaaaaccctcatggggcggtagtcgaaaacggctctattctgcggaaaggcataatccgctaaccgcctcatgggccaaataccgccccatgagtgttttaccgccccatgggaatcacggttctgccttctttcgacggggtaagagcgtaagtggggcatatataggagcgtcacaacctctgttatcgttcacgatgtgaccgcaacgcggcgtgccacaaaatcgaacctatagttaagccccatgtagtgagctatctcacaacgattggctcgctacgtagaattcaagacttggatcgcaaacgtcgttcatcccacacaatgggagggcgaacggaacacacagtccaatcaagagttcgctcgccgcaacaccattgagcagttgcacgcgggcaggtttgcaagaagagggctcaaatatgactgctgctgaacagcagatttccggcaatcccgcggctatggaaaacgcacaagcacgtaccaccgtgacggatcaagccaaggttcaggatattatctcgcgcatggatcgcgcacatgaaaccccgatgttccatcgcatcgtgacgctggtcgccgctggcatgctgatggacagcatcgacgtatatattggcagcgccgtcgcctccagcacgttggctacccgctggtccaccgttgcgcaaaattccacctttatgtccgcgggcttcctgggtctgctggtcggttcgctgctggccggcttcgtcggtgacctgaagggccgccgcgtggcttaccaaatcaacctgctgctgtttggcggcttcaccttcctcggcgcattcgccccgaacatggctgtgctgtccctgtgccgtctgggtgccggcctgggcctcggcgctgaaatcgtcaccggcttcgccatggtcaacgagttcgcaccgatgaaccgccgtggccactggtgcgcgattgtctcgctcgtggccaactgcggtgtgccaatcgctatgctgctgtgtgcatggatcatcccccgctggtcctggcgtccgctgttcgtggccatcggcctggtggccgccatcatctggtggctgcgccgcgacatccccgaatccccgcgttggctcgccgtgcgcggccgttacgatgaggccgacgccatcgtcaagcagcttgaggccaacggttccgaaccgatcgacgcagccgccaaggccgacaccagcgacacccgcaacgccggaggccgttcgctcggcatctgcctgcttgtggctgtggttgctgtggccgccacgaacgtgtgctcctacgccttcacttcttgggttccgacgattctggtcaagcgtggtattaacctgtccagctcgctgctcacctccacggtgatgatgctcggcgccccggtcggctgcctgattggctctctgcttatcgaccgcatcggccgcaagggcacgattgtgccggccttcctgttcactggcgtgttcggtttgatgtatgccttccagacctctaccgtgagcgcaattatcgttggcttcctgctcatgatgtgcctgtacgtgcttatggcttccgtggtggctgtgtacgctccggaactgttcgccaccaaggttcgcttccgttgcgtcggcttcgcgaacgccgtggccaagctgctcaatgtgttgatgccaatggtggtgggctggatgcttacctcgcttggtgccacgtccatctttgtggccatcagcgcgattgctattgcatcgatgctgattgtcggcttctttggcgcggagactgcgcagaagtcggttgggtgatcggtttcctcacagtggaataactgctgataatgtccattcggcgtcttgcgtggtgatatgcagggcgccgttttgttgttctagtaattgttggtaacggttgaggccggtgccggtggataggtctgcgtctccagcggacaatcagcgtctgtgatgtcacatgcaatgccaggagcggcatcaacggtcgaatcatgcggagtcactgcactgtgcgccgcttctcccctgccttcaatcacatcaatgacttgatgcgtgcgatccaatgcgcccatagacatatccgtaaccagcacgtcaggccgcttggtggggctcaggcatcggctgatggccacagcacccaaatcgcaggtctatatcacggcaaaatcgctggacatacgttcgattagcgcgccgaacactttcagcgcatatgggtcattgtccacaatgccgatgcgtatgttgcggttgcgcgcttcttccattacattcaccccttcagtgtgcccgacgccgaactactccgtcctgacacgtcatggtcactatgacaactatcattccacatttcctgcgtgatttacgatggaatcatcatcaatccttgataaggcggtaaaggaggacggcaatgaaccgtgcacaagcactcagcaagctcaacaggagcgatatgcgcaatgccgccgccgagcgcgggatgcaacgactgttcacatggaaccgcgcgcattggattggcatggttgtactgatagcggtgttgctgctactgcagtggagctcatcaatgtatctcatgcccgacgaggttcttgacagggctgccaaaaacctgttcgtatggttccccggtatggttctgcactggccattggtgttgggaatcaccaacttgatactcggttcgacacgatccggcagtctgtctttcccgttggcgagcgcaatcatcggaccactggcattcggctggaccaatcttcgcttacggccggggttcccataccgttcctgggctcaagggaaagccgcaatataatgaaaacagcgatttcatgcaatgatgcacgagccgatccaagcaaaggggccaaccatgagcgagcaactgatggaacagtaccggttgcacggacaacgcaaacgccgtaacgcttgtatcgccgccatcgtgacagtagtgcttgtccttgccgtcgccggcggcgtatggtggacggccggcgatggcagcgcattggttcgcaatatgttcaagccgaaggccacgcctgccacgcagccggtagtcaacagcaccgcaaccttcgcctaccgcaccgcaccggaattcctggcgatggaagccggcgaccgaggcaccggcaatgtgaactactctcctgcttcgatgtggatggcgttggccatcgccgcgcagggcgccaatggcacgacccgctcgcaactgaacgaactgctgggctccggttcgctgaccgatagcgactaccaatcgctgctaagttcgatcaacgggcaatattcgggggcgaaatccgagatgagcgccgcgaactcgctgtggattgatgacgactactctcttgccagcgattaccaatccaccgtcaagaagatgttcgaggccgaagtcaccacgttaccgttcgacgatcaggccgccgcaaagatgtccgattggatcgccaagcatacgaatggttcgctcaagccgaagatcacgctgcgtgaccgtgaagtcctgtccatcatcaacaccgtctatgcggatggccgttggaagaatccgttcgaagagcagtccaccggcaacggcaccttccacggcgaagccggagatgctcaggtgccgatgatgcaccggaccttcagccaaatggcttacggacatgatgagtacaacacttggcagcgggtggagattccgttcgacaacggcggcaatctggccatcgtgctgccggccgaagggcatttcgacgagttggccggcgatgccgagaagctcagttgggcgttcggtacatgctcgacggcttcccttggcgagggcgcaatgggttgcgccgcggacagtatgcccggatggggcgtctccgtcaactcggtcatggtgaacgtcacgctaccgcgattcaccatcgacagcatgttcgactcggaagccaccatcaaggcattcgaaaaactgggggtgaccgatgcgttcagtgcaggcgacgccgacttcaccaagatgatcgacaccggttcgcacggcgagaacctgtatatcggctcgattctgcaaggcacgcgcatcgaggtgaacgaagccggcgccaaggccatgtccttcaccaaggtcggcgcagactccgttagcgcgccggtggacaacgtcgagttcacggtggatcgcccatttctgtattcgtacgtcaccccggacggcataccattattcatcggtgcggtgcgcaacctcggcggagtcggtggagaaaactgatactttcctggcagtccgtcaattagggtgtatcgtttgacgcatggttacgatgaaggaaatcgcgaacaaggcgggggtttccgtctctacggtatcgctggtgctcaacggacgcgacgaggggcgcgtaaagtccaaaattgcggacaatgtacgcgccatcgccaccaagctcggctaccagtcgaatccgctggccagttcgctgcgtacaggcaggacgcacatcctcggtttcatcagtgaggaggtggccaccaccccgtacgccggcggtatgattctgggcgcgcagaccgctgcaagccagttcggctatatgctcatcaccgtgagcaccgacggcgagaacagcgagagcgaggaaatcgccgcactcaagcgatacggcaccgacggctttctgtacgccaagatgtcgaaccgcatcacccatgtgccttcctcgctggccaagacgccactggtgttggtggatgccaccgactcgcttggcaaaatcccgagcgtggaaccggacgagttccaaatcggctacgacgccaccaccagattggttaaggccggatgcgcacgtatcgcctatgtgggttgcttggagccgctgattgcgcaggacgatcgtttggaaggctatcaggcggcgctcagggacgccggcctcgactatgacgatcatctggtcgtcaatgtgctcaacaacgggccggcactgaccgcagtcagcgatttgttcgatgccgagcatccggacggattcttctgcttcaacgatgcccgcgcctggtatgtgtacgaatgcgccgcacgccgaggactcacggtcggcaaggacatctccgtggtcggcgtggacaaccatcgcgtgttcgccgaaacgctggaaccgatgctcaccactgtggaactgccgcatttcgagatgggctactgggccgtggccaagctggtgtcgattatcgaaggacgctcgatggacgacgtctcatggccagcgaccaccgctcccctgccgccgatcgacgcgccgattccggcgaagatccactgcacgctgatcgaaaaggcctcggtgaagtaaccgagtcccacacgatttctcaaggcctccgttcagcacggaggccttttgcgtgtcgaacggatacgacacgccgatttacgtcaatcgattgacgtaaatcgattgacgtcgcataataattactacgcaacaacttctacaaaggcacggccgcccgagcagaagcgttacataaccaataaccaaccaagtagtaatcaaaggatgattatggcaagtgcaaccaaatctgcatggaagaatccttcctatctgcagagctctttcggcatcttcatgttcttctgctcctggggcatctggtggtccttcttccagcgctggctcatctcaggcgttggattgaccaatgctgaagtcggcaccatctactccatcaactcgctggccaccctggtcatcatgtttgtgtacggcgtgattcaggatcagctcggcatcaagcgcaagctcgtcatcgtagtctcggtaatcgccgcctgcgttggcccattcgtccaattcgtttacgccccgatgatcctcgccggtggcaccacccgctggatcggcgcactcatcggctccatcgttctgtctgccggcttcatgtccggctgctccctgttcgaggccgtcaccgaacgctactcccgtaaattcggtttcgaatatggccagtcccgtgcttggggctccttcggttacgccatcgtggcgctgtgcgccggcttcctgttcaacatcaacccgctgatcaacttctgggtcggctccgcattcggccttggcatgctcctcgtgtacgccttctgggtcccggccgagcagaaggaagagctcaagaaggaaaccgacccgaacgcagcccccaccaacccgtccctcaaggaaatggtcgccgttctcaagatgccgaccctgtgggtgctcatcgtcttcatgctgctgaccaacaccttctacaccgtgttcgatcagcagatgttcccgacctactacgccaacctcttccccactgaagaaatcggcaacgccacctacggcaccctgaacggtttccaggtcttccttgagtccgcaatgatgggcgtggtcccgatcatcatgaagaagatcggcgtgcgcaacgctctgctgctcggcgctaccgtgatgttcctgcgcatcggcttgtgcggcgtgttccacgacccgatcaccgtctccatcgtcaagctgttccactccatcgaagtgccgctgttctgcctgccggcattccgctacttcactctgcacttcgacaccaagctctctgccacgctgtacatggtgggcttccagatcgcttcccaagtgggtcaggtcatcttctcgacccctctgggtgccttccacgacaagatggctcagattctgccgaacaacgacatgggatcccgcgtgaccttctgggtcatctctgccatcgtgctgtgcgcactgatttacggcttcttcgtcatcaagcatgatgatcaggaagtcggcggcgacccgttctacaccgacaagcagctgcgtcagatggaagcggcccaggcctgaaaggacagccatgactgacttcactcccgaaacccctgttctcacccccatccgcgaccacgctgctgaactggcaaaagccgaagccggcgtggctgagatggccgccaagcgcaacaaccgctggtacccgaagtatcacatcgcctccaacggtggctggatcaacgacccgaacggcctgtgcttctacaagggccgctggcacgtgttctaccagctgcacccctacggcacccagtggggtccgatgcactggggccacgtctcctccaccgacatgctcagctggaagcgcgagcccatcatgttcgcaccgtctctagagcaggagaaggacggcgtgttctccggttccgccgtcatcgacgacaacggcgaccttcgcttctactacaccggccaccgttgggccaacggccacgacaacaccggcggcgactggcaggtgcagatgaccgcgctgccggacaatgacgagctcacctccgccaccaagcagggcatgatcatcgactgcccgaccgacaaggtcgaccaccactaccgcgacccgaaggtctggaagaccggcgacacctggtacatgaccttcggtgtctcctctgcggacaagcgcggccagatgtggctgttctcctccaaggacatggtccgctgggaatacgagcgcgtgctcttccagcacccggatccggatgtgttcatgctcgaatgccccgacttcttccccatcaaagacaaggacggcaacgagaagtgggtcattggcttctccgccatggggtccaagcccagcggcttcatgaaccgcaacgtcagcaacgccggctacatgatcggcacgtgggagccgggcggcgaattcaagccggaaaccgagttccgcctgtgggattgcggccacaactactacgccccgcagtccttcaatgtggacggccgtcagatcgtctatggctggatgagcccgttcgtgcagccgattcccatggaggatgacggctggtgtggccagctcaccctgccgcgcgagatcactcttggcgatgacggcgacgtggtcctcgcgccggtcgccgaaatggaaggcctgcgcgaggataccctcgaccatggttcgatcacactcgacatggatggcgagcagatcatcgccgatgacgccgaggccgtggaaatcgaaatgaccatcgacttggctgcctccactgccgagcgtgcgggtctgaagattcacgccactgaggacggtgcctacacctacgtggcttatgacgaccagatcggccgcgtggtggtggatcgtcaggccatggccaacggcgatcgcggctaccgcgccgccccactgaccgacgccgaactggcctccggcaagctggacctgcgcgtgttcgtggatcgcggctccgtggaggtctacgtcaacggtggccaccaagtgctgagctcctactcctacgcctccgaaggcccgcgcgccatcaagctcgtcgccgagtccggtagtctcaaggtggattccctgaagctccaccacatgaagtccatcggactggagtagctccctcacctccctctgacgagggaggtttttttgtgcgccctgtcgttcgccttcgcctatactgatggacggcatataacacgatccatcacacgaccggcaggcgcgcaggctcctcaccttactgttccacgccccggccgcaagcgccaccagcaaaccggactggcgcggaaagcaaggtgacatcccatgtccatcgccaagcgcctcaagcgccgcatgcccaccgtcatcgccgtcatcgtatttctggcagtctgggaaacgtgggtggatctaggacatgtctcccccacgatgatctccgcgccaagcgagattttcgccgccaccatcgaaacatggaacacgctcggcccggccgcggcaatcaccggctatgagggcgtggtcggcttcctgtttgccgtgttcttcggcattatgatcggcattgcactgtactgctcgcacacgttcaacgcggcgttctatccgctgcttgccgccgcacaaaccatgccgctgatttccatcgccccgttgttcctgatttggttcggttttgagatttccggcaaaatcgtaatcgtggcggtattcggcctcttccccatcgccgtgcagactgtgcgcggactagaagcagtgccccagttctattccgacgtcgcattgacctgcggcgcgaccccggtctggacgctctggcacgtgaagctgcgcgttgccgcacgtcagatctatggcggtatccgagtatctgccgcatacatcttcgccacggcatccaccgctgaataccttggcgcacgcaagggcctcggcatctggctgcaggctgcctacaattcattccgcacgccgctgatcttctccgccaccatcgtcattatcctgatgacatgcgtactgatgctggcggtaaacgccagcgagcgcatcctgctcggcccggccggcgacgacgaagaccccgacgcggaccagtagttcttttttaccgtcaaaggcacgagccggcggccaggaccgactgaacgaggcggcttctcatgaggtctccaaccctgtctctataatggaacagctttaccagcgtgtggcaaaccggctttcccgagctttcatagggaatgtcgggggcgctggtcggacggaaatcaaggccctccatatcgttttctgccgacttccgttcgaagcaatcccagagaacgatagagagacaacgaattagggaaccatcattatgaagaaaagccttgtatccaaggccgctgccctcgtgggcgcccttgccatgactttcggtttcgccgcatgtggccagaccaacaccgccgactcctccaaccccaacacctccgacctcaagaaggtcactttcatgctttcctgggcacccgataccaaccacatcggcgtgtacgtggccaagaacaagggctacttcaaggacgccggccttgatgtggatatcgtggccgtggcccaggccggtgccgaacaggccgtgaacaacggtgtggccgacttcgccctgtccaacctgaccaacgtgggcgtctacacgctgaagggcgctcacatcaagcaggtgctgcaggtgcagcagaagccgagcgccatttggtgcgcactggcgtccaacaccgccatcaagtcccctaaggatttggatggcaagaccttcgccaccttcggctccaacgagtccgatgccgtggtgcgccgcatgatccaaaccgatggcggcaagggcgaattcgacaaggtgaccgtcggcacctccaccttccagaccatggaatccggcaaggccgatttcggcggcttctacgccacgtgggaaggcgtgcaagccgacatgtacggcccgaagctcaactgcttcaccgagcctgactatggcgtgcccggcaacgccgacaccatcggcatcatcaccaatgacaagaccatcaagaacaatcccgacctggtcaagaagttcactcaggccactcaaaagggttacgagtacgcgtacgccaacccggatgacgccgcgcagattctcgtggacgaagcccctgacgccaacctcaagcccgaattcgtcaagaagagcatgcaggttatcgtcgacggccagtactggggcgatccggccaagatcaaggacggctctttcgtgctcggcaccaacgacttcaagggcgctcaggaatacttcgacttcctggctgaagaagacgcatacaccgacagtcatgacaagataattcatgaggccccgcaggccaaggaccttgccaccgacgaattcatcggcaagtaatttccgatattccgagtttgaatctacgcaaaaatgcgtccttcccatgaggaaaggacgcatttttgcgtatcggccgataaggttattcatagcggatcacgctaacaaggagacgattctatggtccaatgtcctgaccgtattattgccagcatggatacgggtgttgatgatgcgttggcgttggcgtatttgttggggtcagcggatgagtgcgagttgggcggcgtgattgccggttatggcaatgtggatgcgaacacggcttatgccaatacttgcgcggtgcttgatttgtttggtcgggcggatattccagtgtttttagggtctgagcatccttcttgggctgatgcgtttattcctgatgcagggtgtgcccagttccatggggatgatggactggggaatactcggctggcagggtccggggctctggctgatggagcttgtgtgcctggtgatgatatgtctgtggatgtgcccgatgaggttgtttctgttggcgggtatttggcgggggatgttcatgctcatccggcgttgggtgcttgttctcgtgtgaaccgctctcggtcggtgggccacccccagtcggctatgccgacagctctcgccagcgggggcaaaaggagatgctccgttgatgctgcggatgggattgagtatctgattgagcaggttcgcgagtttggccgagacgttaccgtgctggctaccgggccgttgacggatgtggatgcggctattactcgagcaccggatattgcatcgaaactcaggctggtgatgatgggcggtacgcttacccaacccggtaattgttgggatgcggtagctgagacgaatatcatccaagaccctgaggccgcgaatcgtgtatttcattccggcgcagacatcacactggtgggacttgatgtgactcaccagtgtttgctaccgcaatcggcggccgaccggtggcgtgcgacggggaccaagcgcgggcggttcttggctgatctcgcggacttttccatcaaggcaaatttggaagccgaccccgcactgttctctggcggcatgccgttgcatgatccgttggcggcggcggttgcacttgattcttcactggtcgattgttttgatcttgcgttgcgcgcggagaccaataccggtgatttcaatggagtacgaggccggaccaccggagacccggttgggctggtgaatcattccatgccgcatgtgcatgtggcacttggtgtggattcgggacgctttttggatgagtttgtagagaggatggctgaggtgtgccggtaactcccctcagtccgctacacgggcagctcgaccgcaattacggacaagctgccgctcgcattcttctggctcgactctcgtctcgactttgcctacaaacagtccaccgggcgtttgctttacggctcagcccgtcagagggggcctaacaaggactatttcacaccgccgaatcggcgatcgcggtggatgtaatggtcgatggagcgccatagcacgtcacggccgcagtccgggaagagttcgggcacgaagtcgagctcggcgtaggcggcctcccacggcaggaagttggaggtgcgctgttcgccggaagtacggatcaccaagtcgcaatcgggaatgtccggattgtacagatggtcggcaatcatcttctcagtcacacggtcgccggaaatcttgccatcgcgcacttcgcgagcgatggcggcgcaggcgtcggcgatttcagcacggccaccatagttgatgcagaacaccacatcgatgaccttgttgttcttggtgcgctcctcggcggcttcaagctcgtcgatcaccgacttccacagcttggggcgacggccggaccagcgcacgcgcacaccccactcgtccatctgttccacacgacggtggatgatttcacgcgagaaacccatgaggaagcgcacttcctgtggcgagcgcttccagttttcagtggagaacgtgtacaggctcaaataccgtacaccggcttcgatggcaccggcgatagtgtcgaacaccaccggttcggcggcctgatggccattggtgcggaccatgccgcgctgcttggcccaacgaccattaccgtccataatcacaccgatatggcggggtaccttgttcttggggaagtcgggaatacgagcggggtcgctgaacggagctgcgggaatgtccaacgacgtgtaatcaacgttctcaaaagccatactcatgaatctatcaagcgcagcgaacgaatcgggcgttcgaggtaatactccccccaatcttcaaccaactcctgcacaacccgctccacaggcgcggcatcaagcaccgaccaatcgccacgaatcagtgcatcgaactggtttaacacgaacggtgcgatacggcgcgcatcggtagtgtggtcggcttcgcacatcacaccgccggacgcgatggacaggtacgccggctccgccttgccgcataccacgcaagtgcccaatcgtggcgtccaaccggccaaggccaaggcgcgcatcacataggagtcgcctatggcttgcggggcgtgggattgtttggcgagcgcgttcaacgcgccgatgagcagccgatattggttcggcagctgctcatgttcggtgctggcgattttatcgatagtctcaacgatgacgttggcggcctcatacgccgcataatccgccgcgatcggagcaccataagcggcgaccgcttcagcttgggagaccacgtcaagcgagcggccttcagcgataagcacatcgactcgcatgaacggctcgagcctggcaccaaagcgtgatttggtgcgacgtacgcctttggcgaccgcccgaatcttgccatgcccacgcgtcaggatggtgatgatacgatcagcctcgcccagtttggaggtgcgcaacaccacaccttcgtctcggtacagcgacatctcatctcctttccccgcgacgcctggcagactctactcaatgaagtagtcagtaaataaacagaccccagaaggcgaacaccaacagtatgtacagcatggtgaaggccaccagccagaacaggattcggcccagacgggtggaggccagtaccgggtcagcaccggtgacgatgtctcgaacggattcgcgacgagggggtatctgaatcaggccgcggacggaagcgacttctatcagatgcataaagacgcgggaccaagcccatagcaccagcacggacaccacttggatgaccggccagctccaatacatgacacccggcgtctcggtaggtgcgctaccccatgcaagtttgaccacgcccatgatcacctgtccgagtccggcgaagaagatgagcaatgtggcaagagtggtgagggtcaaagtcagcagcgcattgccgaaaccatgtgcgaaaccgagtaccacaggccgttccggtatcagcatgcccgcacgtttggcctcgcgcttctctcgccgccatcgggcatccgccgcgattttgcgacccagcgccaccagtgccagcacgatggatgcgagcagcagcagtaccaccgtgacgtgcagaatcacaccataaatggtgccgacgcgtcttgccttcaaagcgcccggcagaccgattgattggtacagattggtgccggccaccttttcactggtctgcgtgagtccggcggaagtgccgacggcccagtcgatgagatcgtccacataggcgtccgcaaacggggtgcccgcttcggactcatctcccaagcgcagcacatggttggcgaccgggtagctgcgcacggtcacattccagttatcggctttgtgggcgttgtagagaatcgcacgcacaccgtcgacctgcgccgtcatcacgtctttcgaaccgtaagccacataggtgggtacggcgtaggcggcgggtttgagtgtggcgaggtcgaaattgttcagtccgaacaggccggtgtccgcgctgaacacacgttggacgatggattgatagccttcgttcgcgccaacaagggtgaagtcctgggtgacgaaaaatcccagtgattggcgtgggctgaacaccatcgggctcaggagaatctggaaagcgacgtccggatcgtcctcgagcagatacgaggagatccatgtcgattcggaggtggcatagatgccgaccttggcctcgtctacatcgctttggtctcgcaggtattcgatgacctgatcataagccttggctgaggccggataatcgcggttgatgtcggtggtgttccaaacgggtttgtcgagcactgcggtcacaaagccggccgaagccatatcagaggccacgtcgccaaaggagttgtcacaggtgccgtatccggcaccgtgcatgaacaccacgccggggcgcttgcctgatgcgttctgaggttcccgaatcaataccttgatagcttggacgccgtccgcattggccttgccccgagcaccggactccttggtcagattgccgtcgctggtcatgttcagcgtgatgtatcgctcggtgacctcatacgtgccttttgccggcagcgtttctccggacgggttatcgaaggtgacttcggtatcgtcggtgagcgtggccatcgactggccggtgggttcgatgttccaaggcaccgtggtcagattggaaatggagaccagcacgccaatcaggataatgaagatgggcaggctgaccatcagccggtgggtgctggtccacggcttggatcgaacagtcaggcgatgctcttcttcttgcggcacgtgcgctattgtaatctgaccgcgatatttatgccgagggcctattcggccgaatcagtgaccggggtgctggattgggaccacgaccgggccggtggaattgacggggacttgaccgtcggcctccatttgggcggcgatatcgttcgctatggtgagcagcgtgtcgacgatctggtcttcgggcacggtcttgatgaccttgcccttgatgaagatctggcccttgccattgccggaggccacgccgaggtcggcttcgcgtgcctcgcccggaccgttgacgatgcagcccatgacggccactcggatcggcgcggtcacgtccttcaggccttcggtgacggcggaggcgagctggatcacatccacttgggcgcggccgcagctcgggcaggagatgatgtcgaacttgcgggggcgcaatcccatgtattccaagagtttgcaacccaccttgacctcttcggccggcggcgcggagagagacacgcgaatcgtgtcgccaatgccctcggccaagagcgcaccgaacgccaggcaggatttgatggtgccctgccaggcggggccggcctcggtgacgccgaggtgcagcggccaatcgcccttggaagcgagcagtcggtacgtttcgaccatggtgatgacgtcatggtgtttgacggagatcttgaaatcgtggaagccgacgtcctcgaacatgtgcgcttccttcaaggcagaggccaccaatgcttccggagtcgggccaccgtatttggcgtagagttccttgtccagcgagccggcgttcacaccgatacgcagcgagatgcccgcgtcggtggcggccttgcagatgtccgggccgacttcgtcgaacttacggatgttgccggggttcacgcgcacggccgcgcagccggcgtcgatggcctggaacacgtatttggactggaagtggatatcggcgatgaccggaatcggcgatttgcggcagatttccggcagtgcgtcggcatcgtcctgactcggcacggccacgcgcacgatgtcgcagccggcggcggtcagttcggcgatctgctgcaacgtggcaggtacgttggccgtgagcgtgttggtcatcgactgcacggagatgggcgcgcccccgcccaccggcaccgggcccaccatgatgcggcgggacttgcggcgcgggtgcaagggcgattcgctggtcaggtcgaccggatcaccggttttgcggaacggcttttcgatgggattttccgtattcaaggtattcatcattgcttgtttatcaggtcgtcggcgcgtcggcgggcttcaagctcaagctggttcatttcctccacgtccgtgaacagcgggttaccacgaagctcggcgtccatctggtccagcacggctttgaccgtgtccacgatgccgaggtatggcagacgatgctcgaggaaggcatgcacggcctgttcattggctgcattgagcaccgccgtatgcttctcggaggcggccaggcagtggcgggccagttgcacggcagggaacgcctcatcgtccaacggttcaaaggtccaagttgcggcttgcgtccagtcgcacgcggcggccacattggtcatgcggtccggcgcggacaggcccagcgcgatgggcagacgcatgtctggcggcgaagcttggcaaatcgtggcgccgtccacaaattcgaccatggaatggacgatggactgcgggtgcacggtcacgtcgatgcgttcaggcggcacgttgaacaagcgggacgcctcgatgacttcgaggcccttgttcatcagtgtggaggagttgatggtgacaaccggccccatgttccacgtcggatgatgcagcgcctgctcgggagtgatgttctccatgtcggcacgtttccagccgcggaacggtccgccggaggcggtgaccacaagcttggcgacttcggcgtgggttccggagcgcagggattgccagatggcggaatgctcggaatcgaccgggttgatttggttctcgcgcacttgcgcgctgaacagcagatgcccgcccgcgactacggactccttgttggccaatgccagctgggaaccggccttgagcgccgcgatcgacggttcgagtccgatggagccggtgatgccgttcaatacgacattcgcaccggagccggccatggcgatgaccgaatccggaccgccggtcacgcggacaccttgtgcgccggcctgtgcgagagctgcttgcagcgctggaaccttggtctcatcaaacaccgcgacttcggacacatggaactgtgcggcctgttgcgccagcagctcgatatgtgctccgcccgccgccagaccggtgacggtaaatcgttcaggatgacgcgagatgacgtcaagtccttgggtgccgatggatccggtggatccgagaatgatgacagtggagttggaggctatgctcactgttccttcttcgtatcgtcattgttcagtgtggggaacgacaggtcggggatatccgaatcgaagttaccgccaagcgggaacagcagcgggaacgaatcgctggaatcgtgcttatcctgtgacggctgagctgcttccgtgtcatgggaggcggcaacgtattcagatgattccgcagccggacgggagatcgtgctgtctgcaggctgactatcggatacacgaaccggaatggagttcgtgttacgatccggcttgctggtgggagcaaaggagaccggcatagcagcggacgcagcctcgtcagcagtgctattcacaggctgtactgccggggcggagggtgccggggatgaaaccgaacccggtacctcattcaatttcagcgcattcggtgcatcaaggctgggcatcttaggagcgaaggacggtgcatccactgccggaagttcctgagaaaccgcagccatgtgggcgagagcggccaaagaggaatcgttctgcaccatatccacgggctgttccgcgaacaccgacggggtcgatgacggagcagcgggttcgtgagatgcctgtgccggagcaaacgaggggacgctgccagcggtcacaccggaaaccggcgcggacggggcactgacgggaggctcagccgcagcaactgcggtaggagccacggaaggcgtctcggagacgggcttcgccgcagactcgttggacgcatgcaccgggtatgctgcgggagcaaaggaaaccggctgttccgcattggtgctattggtgcttgtggaagcatcgaacgatgcaggagccgacgcataggcgatcggtgccgccgcggccggcgctgcgggagcaaccggagccggagcagtgaacaagctctgctcggcctgatgcagggcatcgaatgattcgtcatgagcaacggcagccggagcaaaacgttcgtcagttgccgggcgctgcgttccggaagcgaacaacggtgagacgccgttcgcttgaacggtcacgttcgtggcggtctgggcaggagccgcaggctcgccggacacgaaatcggccacacgtgcataggattccaagcgactcagcaactgcacgcaggcgttcaggaagtaatcgacctgtcgctcgtcataacctttcttgcccttgcgctgggtgaagatcacattgttgaccgtattcgcattgagatcggccaaagaccgtacatcgtcttcggtaacgccgtcaacgcccaatgcggccgccgccttgtccacaatctggtcgaccagacgatccacctgcttcttatcgtacgaaggctgcttgggcgctccggacttgaagcgttcgcgctcgttacgctccgcatggttctggacttcgtgatacagcttctcggtcttcgccttccacgtcacacgcccatgctgtgcgatctcccatgtggtctgcttatcgaccacggcacgttccagacgtccaagcgcggcgtcaacctgtgcgatcacatagccgttcttgcgcaaatcaaaggacacgttctgaatgtcatgctgggtgagattcatgccctcgctgtcatacagagcatgggcgcgctccaggaaagcgtccacctgagcggggtcatacccccacttgcgcttgcccgcacgtgcgatgcccgacttgccgtccccttcacgaagttcctgcgccatcggctattcgacctcctgctggatataaacactctgccacaactttacgtgactattgagacgcatctgaccaagaagaccgaaattcacgattttgtagcagtactgccggtttccttctgcacgcatctcattgagatttcagaacccttgccgaagactgtcagggaatatcgtcacagcctatatccgtggaatgaggggattccatgaagcgatgaaaaatgaaagtgggcaatgagggactcgaacccccgacatccaccgtgtaaaggtggcgctctaaccaactgagctaattgcccgcaaatgacaacaatagcgcatggccggcactgcgcgacacgtggtgtcgcatacgcgtgccgtagcgctcaatcgcaatgacattcagtcacgcccagcagcactacgcagcacacgacgccggtcaacacgcttaaagtcaagcgtattgattgaggcttatcagcggcccttgccgaatgcgcgcaggcggatgccgttccagtccgagctgacggtcagcggggtggcggcgttcataccggcggtctgtgcagcggactgcacggtggacgagctggcggcacccgggcggccgggcttgggagtcagtatccacagcgggccgtcattgcccagtaccgcgtaggcgtcaacgatcgtatcggacaattcgtcctcatcatcgccgtcgcgccaccatacgatgacgccgtccacagcggagtcgtagtcctcgtccacgagatcctcgcccgtgagctcttcaatctgggcacgaatggaatcgtccacgtcgtcgtcccagagccactcctggacgatatcgccgggctcgaaaccaaattcttcagcgttctgtgatgccgtttgattcacaggggacacattagcaagtcttcgcgaacaaatgcgttaacgcggccgaaaatcgccgcattgtgggcagacccatgcgagtcgtctcatcagaaacaacgactggccgcgcatgtcaggcctcgcaatgaggcaaatcgtcggcctgccccttgccgatggccaccaacgcctgatacgcctcgtccagcgtggcgaccttgacgtcgcgcagaccatccggcacgcggccggccacatccgaacaattcgacgcgggggccaggaaccatgtggcgccatcgcgcttggagccaagcatcttcagctctatgccgccgattctgccgactttgccgtccttgtctatggtgccggtgccggcgatggtcttgccgccgctctcgttggcgggggtgagtttgtcgatgagaccgagcgtgtacatcatgcctgcggacggcccgccgatgctgtccacgtgcatcgtcaccttggcgtgttgcaatgcactggcgtcaatgcccagttcgtccgcatgggctttggcatacgccagaccgacggcactggccgaatcctgggaaccggccatgtcttgttcgactttcttctgatactggtccgcgctctggcccaccggtaccgtggcctcacgcggcatgacctccacctgcggattggaccaaccccagacggcctgcgcgttgatgatcgggtacccgggcacgccggacgcgttcaccgtggtcagcagcagcttgccggaatccttatacgtcgtcacgccggtaccagtgatgtcgataaccgcaccatcctcaactttgcccagcacatcctgggtgggtccgggcatctcgatgacgtacgggctgggcagcagcagaatcaccacaccaagcaacacggcgaatgcaccgacgaaatggcgtttcggacgagcggccgcataggcccgagcacggctgattccacgagataggcgcgaatcatgcttcacttcgaacgatggcatgtgctcatctcccgcttccgaatccgcagtcgggctctcctgctcctggacgaggtctggttcctgattcctgtggcgtgcaaacataccctacagtgtaagcggagggccgaaatcggccgaaaacgaacataaaccgaaaatattgctcggccacaagcgaacaggcccgggcagaccctacacttggggtaacacaccgcggcaaagaaggatacgcatggacgacaacgcgattcacgagtggctgatcaaatgcttcggccccattcagggtgagatggcctggcagcagatcagccagttgcctgaggagatccgtgaacagctgatgagtcaggaccccagccgactgcccaatccatccgaagtccagcagatgatggccgcgttcagcgccggcggactcaacacgatgggcgatatgcagcgcactgtcgaggaagggccgatcaacgtcaagctcgccaagtcgattgccttgcagcaggccaacgcctccggttctgcatccagcgtgtccgccgtggatggcgaggcggctcgccgcgcgatgagtgaggcgaacctgtggctggataccgcctgcgagttcaatcccgcacccggcgatccggatgtgctgacccgcgccggctgggtggagggcaccatcgaccagtgggcgaagttcgcagctcctgtggccgagtcgatgaacgacgctttggcttcggtgatttcggagcgtcttggcggcgcgttcggcgatggcgagattgccggcatgttcgccggaccggtgccgattccgattcccgacggtatgaaagacccagcccaactgatgaagctgctgggcaacacgtcctttgccatgcagttggggcatgcggccggcaatctgagccatgaagtgcatggcagcttcgatcagggcatcgcgttgctgaagaacccggctggtggactgattgcccagaacgccaccgaatacgcgaagatgctgaacggtgaggcttctgcggccgaggccgacacggccggcacttcaaccgactcggtcaatccgttctccacatccaccgacgcttctgccaatcccattggcttcacttcggccggcaacagcgatgctccggcaactgacggtaccgcccaagtctccggctctgatgcttccgccgatgccgccgacgccgccgcgttcgaggctgcgctctccggattcgagaccaccgagaaaatccccgaatctgaagtgctttccttcctggccctgcaggaaatggctcacgcccgcctgtatgcctcggtaccgtggctgatgccgcgtttcgaggcgctcatcggcaagtacgcacgcggcatctccatcgatctggatgcgatggaggaacagctgcgtgacgccacgtcaatggatccggagtcgatttccggcgcggtgaatctcaccaaggtcggcatccccgacactcccgaacagcgcgaggcgctggcttcgctggaatcgctgctggctatggtcgagggctgggtggattgcgtggtgtggcgcgccggtatggcccatctgcctcatatcgaacagttgcgtgagatgatgcgccgcgagcgcgcgatgggtggccccgccgagcgtacgttcgaaagtctgctcggtttgcagctgcgtcccaagcgcatgcgcgaggccaccgggctatgggagatgatcaccgccgccgaaggccctgaaggccgtgacgccaagtggtcgcatcccgatctgctgccttcgctgcctggcgacaagcccgcagatggcgcgtctccgtcatccgacgccccttcaggttcttcttccgatgccaacggttccgcttctcaccctgccgcagatggcaagaccggcgatatcgattgggatgccgaactgtccaagctgctcggcgaagatggcgaagacggtgaaaacggcaactcggaggatacgcaggcatagtcaaccggccttcagccaattcccgctcctgaacgacgttcaggagcattcagtatgcattacagacgcccgtcacaaaaatcgtgatgggcgtctgcgctgcgctccataaccatccttggtccgtgcatacgacaaatgcagcgaatcctcagctcgggtgatgcccacatacataagccggcgttcctcttccagcgcatcccccgtttccggcgaaccatacggcaagagcccttccgaacagccgatcagaaacacgtgcttgaattccagacccttggatgcgtggatcgtggaaatcgtaaccccgagatcgtcgtttgcggcaagtccggtggcgtccaaacccatcgcctccaatagtgcgcgtttggacgcggcatcgtcggcgagcgcggatgattgccatcccaaatccttgcggacgcgatatttcagtctcgcagcgcgcaaggcggcaccgaataccggctgttgggcgttgatgcgggtgaggatcgcgcaatcggacggcttggccccgttggcaaccaaccgggctatgcgtgccgccacgccctgtgcctcttccatatcgctctcataagcggttcgggtaacgcgcgggccggattcacgggcggaaaccagtttcaggtaatcctcacggttcggcgcggccgcaagcacccggttggcgaggttcacgacttccggcgtcgaacgatagtcggtgttgagattgacatcggcggcgagcggcccgaattcatcggcgaaacgcagcagatcccagctggaggcaccggcaaacgagtagatggtctgggccggatcgcccacgacgcatacgttgcggttcattgcgctcttgccgtcaggtcctcccccgcccagccacagggtcagcagcctgtgttgcaggggcgagacgtcctgatactcgtcgacggtgagccagccgatggtggaacgaatttgggcggcggcttcgggaaaatcatccatgatatggcatacgagcagcagaatatcgtcaaaatcgatttcgccacgcgaggtcttttcctgctcgtaggcgctgtagacgtcggcgaaccgagcggtgtcgagtccggcgggcggctgcctatgggcgatggcacatgcccgggcataatcttccaccgccaccaacgagattttggcccaattgatttcggcgagcacatcgcgaacggtcagcggatcggcatcggtacgtgcggtggcgcggatgatcgcgcgggagacgacgtcacgctgatcttcgatcacatgcggaaatggagcctcgcatatgtctgcccagacgctgttgagctgatgcaatgccgctgagtggaaggtcgcggccgtgactccggcagttcccgcacccaaaccggaacgttcagtacctccccctacgccgagctggcccaatcgtgcgcgcatttccgccgccgcttttaccgaaaaggtgacggcaagcacccgctccggcttccatgccccggtggcgcaggcataggcgattcgccgcgtgaccgtgcgtgttttaccggcacctgcgccggcgataatgcgcaccggcccttgcaacgtagtcgcggcggtacgctgccgctcatcgagcccctcaagaatcccctgcgcctgttccatgcgtccattgtggcacgattcgcgctcacggcacgactcatgcctatggctgaatcgggctcacgacaaaacatcgccagaatcatgcgttttgcgtgtcattctgcggtgcgaatcgccacggatgtattagtgtggaagggtgatgaaacgtagcgattatatgttggcggcactcgcctcagccgtcctgccgaatctgggggtggccggcgtacgcgagaacgtgcaggccagcgcaaccgacgaggccaaaggcatcgatcagaccgtgatccaagatgcctcaggcaagttgtacgacgtatacgccactgacaccaaggaagggcgtacgcgtctgattcgccgtgtgaaagcggcgcagacactggcagccgcgcgcgagcctggtggcctcggcttcgatatggaccgtgtggtcgcgttcgccccgggagacgtttcccgacccggccagacggccaccgcacaggccgtggggcagcagacccaggcggagtccacaccgctgaccccgcgcaagcccggtcccacaggcgagacgaccgtgatgattgccgtccaccgtgatggccaggcgcggcctctcgacctgttgacattggatgactgcgcggccgtcggcaccgccatcggagccattcatcgcctgccttcgacttttctggccaatgccaaatatccggtagttaccaccggtcagattcgttcgcagctgaccgcctggattcgccgcttacgctccgccggccatgttccccaagaaatcaccgacagctgggcgcgcatcatggacaccgagggattgtggtcgttctccacctgcacggttcacggcggattttccgacggcgacttcctgttctccggttccaccatcaccacggtgaccaactggcaggatatgcaggtcaacgatccggcacgagaccttgcctggattttcggcaagctcgacgaatcccatcgcaacgccgtgctttccgcatacggccgcatgatgggctctcgacttgacgatctcatcatgctcagggccaacctgtggctgcagatggaacaggtgggcgaattcattcaggcgttgaaccgtgcggacaacgatcacatcatgcagttcaaggcacaggtcgaacgactcgcacaccagttgggcgtgatcaagcacactccggcaccggccccagccgcagggtcggccgccgcctcgtcaacgaagcccggtttgccttccacaatcaccgtcggcacattgttgcaggacgaccgtcatcaggcacccgcacaaccgcagcagtccgacaccggtaccgcggcggccgaggtctcggacgacacgcccgatcccgatcgcaccggttccgctgacatcgtggccgctggcgacgtggatcttaccccggaagtcgaacccgatgctgaccggaccgccaatcacccgcaaacgaatgtctccggcatcgcaaccggtacgggatcgaccaaaccgcagccctcacatggcgcttcccattcttcggtgacgatcacgctgaaggagctcctcagtatgaacgggcatagcggcacgacgtcaaccgacgcttcccctgcgtctcaatccgccgccccgaccgacgatgcggtgaatgacgatactccggacagtctcgttcagtacggagcctcgagtgcccaaaccacggtgattccgctgttggagcgggaagaacgcgctctgcgcgatgcccgtgccgggttggacgggtatgacagcgagggcaatccgctggccgaatcgtccacatcatccaaataatgtcgtgtgcggtgttccgcgccacgccgagcgcgtaacaccgcacatgacgacgcagacacgcggcacaatagagtacagaacctcggccggcgacggccacttaccatgatgttcgtcacaaagacggcagaacaaggagccttatatggatatcgaactgggcattcagaacgtggcacgaccggtgaacttcagcaccgacgaatcagccgacaatgtgagccaggccatcgcgcaggccgtggccgacaacgcgacgatcgatctgaccgatgacaagggccgtcgcatcatcgtgcccgccaaggcactcggttacgcgatcatcggctccgaaaccaagcacgccgtcggcttcggcacgctgtgaccatgaatcgcgcataagcggccttgggcattatctcaaggccgcttttgtattgctgaatcaccgatatagcggaagcacgccgcgatgaacgatctcttcgacagtggcctcgtcggtgaggttctcccccagtttgttcggtttgcctttgccatgccagtcagacccaccggtgaccagcagctggtgccggcggcagatggtgagcagccgttctcgttgctccggtgaattgccacggtgccatacctccagcccgtccagtccttcgctgatcaatgcctcgatctggtcatcggacaacagtctgcggttacggctcacatcaccggcatgggcgatcagaatcacaccgcccgctcccttgacggcggccaccacttcatgagaggtcggcgaaggcgtgggaatatagtatttggatgaggcgctgaccgcatccgcaaacgcttccgaacgagtccgatatacgccggcactcaccaaagcatcagcgatgtgaggccggccaatggtggttttgctaccctccttgacttgggcgagcacggattgccaggtaatcggataatcacgagacaacaattcgaccatgcgctgcgtgcgttgcaaccgtgcggctcgagtattggcgaacaagtccgcgatgtgctgattcgtgggatcatactggtagccgagcatgtgcacggagacgttctcatccgtggcggtgatctcggtgccgcggagcaacggcaaaccgaccctatgagccgcggcttcggcctccggccagccggcggtggtgtcatgatcggaaatggccacgcccttgagtcccaatgccttggattgttcggccaacgtggccggcgtttccgtgccatccgagaaggcggtatggcagtggatgtcccacccgacggcgggcggttccaaaggcatcacatatccagtcataccttccatcgtaacctcatttcagcattcccacgcaaggcgcagacaggtcgtcaccttctgccaacggccgaaaccagacattcggcacccagctgacaaccgcagaggctaatctggagcgcagcgctatcgaaagggacatgatgactcgtaacaccgcaaccgacacatcatccagcaccacgaacaccacgccgcttggcttggcggaggcacgaccgttgattggatggcgccacagtgccacttggacatatctcatcatgctgattgcctcggcagtggcgttgggggcctcgctcattctgtccgctgagactttgcaattggctcggcatccggagtccgcgctcggctgcgatctgaactcggcggtgtcctgttcggcggtggcccagtcctggcaggcggaaatcgtgaaattcggcgggctgagctatccgaacgcgttcttcggcatcgccgccgaatcggtgttcattaccatcgcggtgatcggtctggcgcgtgtgaaggtgccgcgttggttcgcgacctgcacgtggctgggcggactggccgctttggcttactcgtactggctgagcacgcagtcgctgttcgtgattcgcgcgctgtgcccgtggtgcctgaccctgatgttctccaccaccatccagttcatggcgttgagccatgcgaccgtggccgtgcagggattgccgtcacgtaaggctgtggcggctgatgatagcgacagcgaggccgatgtcgcaatggtgccggccggactcaataagtattaccgcctcaacatcgacctcatggtcgatatactgtggatcgtggcgatcgtggtactcatcatcgtcaccgaaggcgcggccctgttcgctgcctgattcctttacaacaaatcgatatcggcgaccagcgtggctgctccggtcagctttacgtcgctgtcggtgacgtccacgcgcagggtaccgccacgtacggtgatgtcccagtggctgatgccggtcttggcccgcagcacaatgcctgtggcgcacaggccggtgccgcaggacagggtttcgccgcagccacgttcgttgacgcgcatcgtggcttcacccacgccggtgttctggtcgatgtcgtcgacccgcacgaattccacgttctggtcggattcgatgaccggagccaccactggtttggtgaccaaatccagtgattcaaccactggcagggacgcgaaggcatcctcgatcaccgcgaccacatgcgggttgcccatatccacgaacgtaccgcgcgccgagccctcagtgccggggatggtgacctcgtaggcgtcggtttcgccgatcttccactcccccatttcgacctggaacacgttggctccgtacggcctcatattgccgcgtggcgtcagaatcttgacgccggcacgggtgccgaggcggaacggctcggtggagtcggccacaccctcacgctgagcgaacaaggtgatggcgcgtgtaccgttgccgcacatctccgccaacgatccatccgcattgcgatagtccatgaaccatttcgtgcccccggccagtacgtccgaaagctgatcatcgcttaaatcagacacgaaatcaggccgtgtcaggcgaatcaggccgtcaccgccaatgccgaagtgacggtcgcacaggaatcggacctcatcggcggtaggctcgaatttgccggacttgtcgaggtataccacgaaatcattgccggttgcgtgtgtcttggttactcgttgcggaagactcatggctttcagagtactctagggagcgaaacaacaccgcaaaacaatcggctttgtgatcggtcgcggcaacatacggttgcaggcatggctatagggaggattcaggcatgagctcttcggctccaatcggcgtattcgattcgggtcttggcggtatttccgtggctcgccaaatcgccaaggatatgccggccgagcatgtgctgtattttggtgattcggccaacgcaccgtacggcatcaagacgcctgaacaagtgagggccctgagtttcgatattgtcgaacggttcgtgcgtcaaggcgtcaaggccgtggtcatcgcatgcaacaccgccacttccgccgcggtgaacgatttgcgcgaacactacgatattccgatcatcggcatggagccggccctgaaagtggcgtgcgaccgtggtgacgtgccttccgacccgcatcatattccccagagggtgattgtggcggccactcccctgaccttgcgtgagcggaagttcgccaaactgatggatcgattcgattccaacaacacgattttcaaggagccttgccccgacttggtggagatcgtggaatccgggcggctcggcgaccatgacctggtgatgcgcacgctgcacggctacttcgaccagtacgacatggagcatatcgactcggtggtgctgggctgcacgcatttcgtgttctaccgcgactacttccgcgagctgctgcccgaacgggctgctgtcatcgacggcaatgagggtaccgtgcgccatctgggcgtggtgttggagtccctgggcaaactggcacccgaagacgcgaccggcggcgtggagctcgccaattccgatccgtccgaacggattgccgagttgtcacgcaaattgctgaacgtatgagccgttcttggctcccctctctgagggaagccaaggaagaaccagacaaattcacagcacactgcccatatcgttgtccgtgcagcacgcgtaagctcataccagattcaagtgaacagggggttggtatgacaaagacggcgatgattgatgtcggcggcgggttccgcgcgattttcggctgtggtgttatggaccgcatgctggaggacggcatcgacgtggatatgtgctacggcgtttccgccggcgcggccaatatgacctcattcatcgcacgccagcacggccgcaaccacaccttctacaccaagtacgccttccgcaaggagtacgcgagtgcggaaagcttcttcaagaaccacaactttgccaacctcgactacatctacggcacgctgagcaatcacgatggcgagaatccgttggatttcgcggcgttcgaggccaatgagaccgggttcaccgtggtggcctgcaatgccgaggacggctcgaccaagtacttcgacaaatcgcgcgtgcgttttgatgatttcgacatcatcaaggcttcgtccgccgtgccggtggcctgcgagccgtatgtggtggatggcgtgccgtatttcgatggcggcatcgctgatccggtgccggtgcagaaggcgctggaggacggctacgatcgcgtgattctgattctgtcccgcttgcgtaacgaagtgcgcaagcagcagaaggatttggctccggcccgcatcctcgaacgctcccaccccgccgcggccgagaagctgcgcatgcgctacaagacctacaacgacgaactcgaactcgccaagcattacgaggcggaaggcaaagtgctgatcctcgcacccgaagacctgtatggtctcaacaccctgaagaagaacttcgagggcctggaaatgatgtatcgcaagggatacgcggcggccgaggccattccggcattccttcaggcatagcgatagtgaagtccctcgcttggaggggcttcactatcgatggatggggattcgcaaacggggtgattacttcgtctcggaagcggtgagcatggccttggtgacctgctcgtagagatcctgataaccgccgggcgtggaggcgggcagcaccacggtcttggtgttgttcgattcggacagcgagcgcatcacgtcgaggtactggttgaacagcaccacgttgttcacgtcgttgatgttcatgcccacagcctgcagactcttgatctggtcgacgataccgttggcgatctcgcggcggtaattggcctggccctcaccctgcaagcgagtcttctccgcatcggcggcggcttgggtctcgatctggatacgctgggcctcggcacgctgacgggtggcttccttttcacgctgggcggcattgatggagtccatcgcgttcttgacctgtgggctcgggtcgatggcggtgatcagcgtcttgaccacggtgaagccgaaacggctcatttcggcgcccacggtcttctgcacgtcgaacgccacatcgtccttgcgggcaaaggcatcgtccaaagacagtgcggggatagcggaacgcagcgcgtcctccatgtaggagcgcagctgaccggccgggtcacgcagctcgtagtaggcggtggccacatcgttcgggttcacgcggaactgggtggaggccaccacggtgacgaacacgttgtcgagcgtcttggtttccagctgcacgttaagctggttgacacgcatgttcgttttcatggcgatgcggtccacaaacggaatgcggatatggatgccggcgaactgcaccttaaggaacttgccgaagcgttcgatgatgtacgcctgctgctgcggcacgacgaagagtgcggcagacagcagaacaatgagtagcacgatgctaatcagcggaccagcaaagaatacggccatgatgttttcccttcacccacgtcgaaaccgccctcggcctcgactcgtgatttccatcatatcagcgttcaaaacaaagcggtagacatcgtacgcatatgtgtacaactgttcactatgtgtgcatgctggcttcttataaaaaagtgcggcatccaatcagtatgctgcggccatgcctgagccgacagccacggcgccgataccgtcctccagcgcggcaagccgcttttccagtgcatcgacagtgggattggccacacgggagtactcgaagccgtcgatgtcaccgcccgcgagcgcatcgccgcgcgccgcgtcacccaggtcgaatgcggccgaggcatagattggcggcacagcggcacggccgttatccagcggctcgtagccggcgtggatggcttgcgttcggaaatcaacgcccattaatccttcttcctcatgccgctctattgtggcgggctcgactctattcccgaacttagcaagtcatggtacgcgacaccggcacatcggtatcgcaattgtcaatgcgcgcttataagcaatggctatagaatatccgccgaatgccggaacacaccaagctgcccagccctctttcagcacctcggccgcaatattacgctgcctcaaataattcaaagccgcgtcaatccgtaccggttcaccatcgaaaatggccacgatgccccctatcggagtatccgcgacgatgtcgatatctccaaagattatgttgacatcgatgccgaaccctttagtaatttgcgacaccaacgcttcagaaacttccttggacacatattgcatccggaccaatcgttgaccttcagacaatctcatcaaaagggagtcatggttctcttttcatatctggcgataacgcatatcaaatcagcaatcagcgcaaagacgctcggtcactccatccggataacaactttgccgtttcgcctaaggtgtcgatgacatggtcaaccggtgaggcagaaagagcttcagcatagttctcgatgcgatagtcgaaataacgatcggcgcccagcgcgctgctctccgaaagcaccggaacgaacgccgtcagcattcgtaacgccttgggagcgctcaaacacgcggggctcatcaccgtggcacgcggaaccggcggcgccgaacttgcccacaccccccaaggaaatcactctgctcgatatctatcaggcagtggaatccacaaacctcgatgatgtgatcggcatccacgagagcgggaatcacacatgccccgtggctcggaatatccacgacgttctcaaagatgcgtatgctccagtggccaaagccatgtcggattccatgagggaagttacgcttgccaatatgcttgccgactaccgaaatcgcattggggtcaaagcccggcaattggaacagtagtgggcaccgaagcgtaagcccccctactctttgatccacataaacagataaggcgcgcgccatcaagaccgatcgatgacgcacgccttatgcagctcagaccacggattcctagtcagccagcagccccagctcctgcagcttgttcttgatatccactgcagagggttccacttggaacgagccgtcatcgtaccgcaccaccggaatgtgcatctggccgctgatcgccacggcacggtcggcggcaccttcctcttcctcgatgttgtgccaagtgtatgccgcgcccagtttgtcgagagtgttctttgcctggcggcagtcgccgcaccatgtggcaccgtagacgtcgatggtcatatcgggtcctttctttgttccgccgcgcttgacttttacgcggtgcactatcaaaccgtattcatcgtaacggggatgctgcgatatcgcggttggcataatgcgggcggtccgcttaaccaccccagtcggctacgccgacagggcgggctctagtgatcgttgcaacacctgacctaccgcaaggagggtcaggtgaccagaagccaccgaaacgaagaccgtggcggggaacaccgttggacgttcaacggcgtcgaatatccgacgaggaagctgatgtgcgaggcgagacgcgccgagtacgtgcgcctgctggacgaggaaggcatgaacttcacccaggccgcgcacgcggtcggcgtctcgaaacgcaccggcaaggcgtggcgcaacggcaggacgcgcgccacgggaaggaacgagaaacccctggtggactggtatcgttccaccatggacaaacccaagaccctccatccgcgctacctgagccaggaggagcgcatccagatcgcggaccgtctgcgtctgggcgattcgatccgcgccatcgcccgcctgctgggccgcgaccccggcacggtcagccgcgaggtcgagcgcaacaggaatcccgagtccggcggttacgagccttaccgcgcccagcagaaggccgcggaccggctcaaacgccccaaaccgcgcaaggcggccgagggcacgcgactgtgggacgagatcgccgccgggttgcgcaggcattggagcccggagcagatagccaaccggctgaggctggacttcccggataatggggatatgcacgcgagcgtcgagacgatctaccaggccatctacctgcaggccaggggcgaactcaagcaggagctgaaacgcgccatgaggcaggggcgaaccgcccgcagaccccaaggcggccaaggccgcaaaccccgtttccgcgaacccatggccatgatctcggagcgacccccggagatcgaggaccgggcggtcccgggccattgggagggcgatctcatcaccggcagccgcaacaaaagcgccatcggcacgctcgtcgagcgcaccaccaggttcacgatcctgctgcacctgcccgacgggcacgacgccgaacacgtccagcaggccatcatcgacaagatgcagcacctgcccaaactcctgcgcaacagcctgacctgggaccagggagcggaactcgccctgcacaaacggatcggcgcctcgctggacatggccgtctacttctgcgacccgcactccccgtggcagcgcggcaccaacgagaacaccaacgggctcctgcgccagtacttccccaaaggcaccgacctatccgtctacccggaggactacctcgacgcggtcgccgaggaactcaacgaccggccacgcaaaaccctcgggttcatgaaaccaagcgagaagatcatcgaactgctcgacgccgcgtgataacctcaacaaccgacaacgtgaccatggaaggccgctcaaacctcaggtgttgcaaccaccactagaatccgcccagccctctgccagcaggggcggaaccagagcataaaaaagcggcgccggtgtggcacaaccgacgccgctccccaggagtagaaaaataggcagaaaagtattagatcaggcaaacaccccccgaagtcagctgttggaacacgtcgaagtcggcatgccgatcgatgtaacgggcgtaagcgatatcgaacgcctggccgagatcttcgatcagatcgttggcgtcctcgatgccaacggcgagacgcaccaattcatcggtgatgccgatcttcagacgctcctcgcgaggcagttcgaaatgcgtcatacgacacggcagctcggcaagagactccaccgcacccaacgacacagcaagacggaacaggtgcaggttgttgagcacgtcagccggatcaacgccaggcacgacctcgaagctcaacacgccaccggcccccttgagacctttggcagccagacgctggtcgcctgcgccgggcagacccgggtaatgcaccgccttaaccagcggatgcaccagcaggtagcgggcgatggcattggcattctcctgctgacgatccatgcgaagggccagcgtctgaatgccgcggcgcaccgcgtcgcactcagcaggagccaacacaccacccaaacggttctgcgcgaagtacacgcggctcgccagatcctcaccggaaacgaccaccagaccggcgttcacatcagaatgaccggccagatacttggtggcggagtgaatcaccacatcggcacccaaagcaagcggcttctgcagatacggggtcacgaacgtgttatccacaatcgaaagcgccccgaaacggtgggccaccgtggagatggcgcgcacgtcgttcaccttgagtagaggattggtcagggtttcaaagtagacggcttgggcaggcacgatgccgttcgcgcggtcgcccttgacggcggcctccaatgctgcgatgtcctgagtgtcgacggcctcaacgatgattccccagcgagtgaagaactcattgagctgggaatacgatccgccataaatattgtcaccgaccacgatgcggtcgccgggcttgaaaatgctcagcaccgcgtggatcgccgcgagaccggaggcgaacgcaaaaccacgcgttccctgctcgagctgggcgatctgctgttccaggaagtcacgtgtgggattgccgctgcgcgcatagtcgtaacggggcatcgcgtcgaccctctcgaaagcatatgtcgttgaattgtagatcggcgggttcacggctccggtgttgttgtctccaaccggcagtccgtggacgagctgagtattgaacctggtcattgcgcacccccttaaagtgttgcgtcatctgcgcgaagccgttccccgcgcggcacgattacgaccttaacgcaaaacgccggcccgaaggccggcgttgctatatgtgttggttatggacgggtataatcagacctctccgtcctgcaagaatggacggcctgacgaccggcccaacacacctcgccgctgccgcggctcggcgtcgcctacggacagtccaccggactgtccgtcagacggctccgccttctaccacgatgtcatcggggttgacttcgttaccgtagaccggctccagagtctcctggtaatccttgtggaagaagttgtctttgccgagcttgacgatctcgtcgttcacgaagttcagcagttcggtgttgccctgctgcacggcgggcgcgatggtgtcgtcgtcaccaaggtgggtgatgccgaccttgaagcccttgttggacttggcccaggcgagcacctcggtgttgtcggtggagaaggcgtcaccacggccgtccagcagcgcgttgtaggcatcggcgtactggtcgtatttctgcagcttgacgttcggcgcgttcttctcgaaccaggtttcggcggtggtgcccttagcgatgatcagggtcttgccgtcgagctggctgacatcggtgatctgggcgctctccggggagaccacaccaagcgccactttcatgtacggcttggcgaagtcgaccttctccttgcgctcatcggtgacggtgaagttggcgagcaccagatcgaccttattggaggtgagcacgtccacacgggcggccgggtcgaccgacgtgtattccggctccacacccaaatccttggccagctgttcggcgaagtagacgtcatagccctggtacttgccgtccttgtccacgtagccgaatggcgccttgtcggagaagacggcaatcttgatcttgccgctcttcttgatctcgtcgaggctgcgggccttggcgttggcgctggagctggtgcccgtgtcggaggacttcgcttcgctcggggtgcctgccgacggaccgcatgcggccatggacgccgccattaccaatgccgcgcctgcggcaatcagtgctttgaatgatttcccaaccttgatgctcattgggttctccttctcttgttgttattgatatttcttctcaaatacgtcgatatgacacaatcgaatcactcgaattcgaaggtgtgcaggaactgctgcgcacgttcggtttgcgggtgttcgaagaacgcctgcgcatcatacgattcctcgacgatgcgcccgccgtccagcaagatgatgtggtcggcgatggctcgcgcgaactgcatttcgtgggtgacgataagcatcgtctgcccggacttggccagttcgagcaccacgtcgagcacttcacgcaccatttcggggtcgagagccgccgtaatctcatcgagcagcagtacttccgggtgcagaatcagcgcacggcaaatggccacacgctggcgctgaccgccggacaattcgtgcggccaagagtccttgcgatcggcaagtcccacgcggccaagcaaccggatcgcttcagcctccacctcggacttatcgcgtttctgcacgagcaccggcgccatggtgatgttgccgagcaccgttttgttcgggaacaaatcgtagctttggaacaccatgccgatacgtgtgcgcagttcactggaccggtcggatcgtccggctcgttccgtgccaggcttgccggcatcgatcacctgattgttgatggaaatcgtgccgccctgaatcggttccagaccggcgatggtgcgcagcagcgtcgacttgcccgagccggaaggacccagcaccacgagcaccgaaccatgctccaccttgaaggagatgtcatccagcaccggcttgtcggcattcgcatactgtttgaccagatgattcacctcgaaacccttgcaggtcgtttcgggttcagtcattcgaccacctcttttccagtcggcgggccacaatggacagcggccagcacacgatgaagtacataaagaaaatcacgccataaatccacaaggttccggtcgggaactggaatcggttcgcgtcgataatctgctggccgaccttgatgacctcgaccacaccgagcagcacggccaatgatgtcgttttgacgatacgtgtcgccaagtttacggatgccggcagcatacggcgaacagcctgcggcagaatcacccgggagaaggtctgccacgggctcaaccccagtacgtagctcgattcgtactgcactttgggaatcgactgcaatgcgccacgcaccagatcgcccagctcggcgcctccccacaggatgaacaccagcacgcaggcaccggtggcatcgagattccaatcgaaccatcgagcaaaaccgtagtaggcaaggaacagcaacgccagctgaggcataatgcggatgaagtcgaggtagatgcgcatcgcggcccggatcacgggattcttcagcgtcatcaaccagcccatcaacaggccgaccgggatggacgcgcctacggatacgccggctatccacacggtgacccacaggccttgcaacagacgtgggaatacgcccggctggagcagtatttcagcgccgctcataatcgaacctccgctccaaccatgtgccgaagatggaaatcggcagcagaatcaccagataggccacgaccagcatgaacaacgactcataggtgctgtaatacatgccgatcagatccttggccatgtacatcacgtcggcgagcgcaatggcggagacgacgctcgattccttaaacaggaagatcacattggccactacgccgggaatggcggtggacactgcttgcggcagaatgactcgggtaatggtttgcgtggaagtcagtcccagcacgtacgcggtttcgcgctgcacgttgggcaccgcttccaatccgccgcgcattgcctcggccatgtaggaaccgcccaagaatccaaggccgactatcgcgcaggtttcggcggaccatactacgccgagtttgggcaggccgaagtacagaaagtacagctgtaccagcaatggcgtattgcggctgagttcgatgtagattctcacgatttgccgggcgaccgggatacgcgcgatttccacgccagcgcagaccagacccaccgcgatggcaagcaatatgccaaacacggatatgaataaggtcatcaatgtgccgttgacgaagaaaggcgcgtaacgctgcacgaacgaccaatcgaatgtcattgggcgcgctccttcctttgcttctcgtttcttcttctgcgcataaacggtcttagccacccatgtacgatttcgggggccgaacatacctgttccccctgccgtgtcatcgtagagtatcagaacacgtggcacggccgctgcgctatacgcattacttatgggacgttactcgatgggcgaacatcagggcattattgtcgcccaaacggtggatacactgaggctatgaagatcaccaaagctctgacccgtttgaccggtcccgaaaccgctccgatgttcgtgctgttgcacggctggggttccaatgaatacgatttgcccgatctgctgaactattgcggtgccggttcggctgattatgccagtttgcaggcacccatcgcctatggcatggggtacacgtggttcggctcgtgggcgcatgagggtgtgccggagggcgaatcattagacaagcaggcgactgaagccgcccaagccattgatgcatgggttgcggagcatattcccgccactcggccggtggttgccatgggattctcgcagggcggcctcttggccgcgcatcttttgcgatgcaatccgaagcgatatgccgcagccgtctcctgctctggatggctggcaccggggtccgttgcgggcgatgccgaattggctgcgttgaagccgccggtgttctacgggcatggtgctgcagacgacatcttcccgaaaaccgatgtgacggcgatgggtgagttctggcacgagcacggcactttgaccgaacaagtgtatccgggcatggcccattccattaatatgccggaaatgcgcgatattcaacggttcttggagaccaacggattcattcggccgcagatttggtagtcaccacctcacatggcgtagtcgacgtgggcgaattcggggactttataccatttgacggggtagccggcaccgtgggcgcagaagaccgagtcgggggtgttgtccagatctgcttcgggatcgtaagcggcggctgcgatgacctgttcggcgtcatggcatggcttgtagccgccgaaagtggcggagaaacggccatggccgtgcgtgtactggttcacatccatcgcatagtcgcgcatctcggacaccggcgcctcgccttcgatcacggcgtattcgccatcggtgaccggggattcgaaggtgccggccatgcgctggatgtcgctcatggcacggccgatcatgtctgctggcacttcgagccggaaccgataccacggttccagcagtcggcagttgccctcccctgcggtgtccggacggctctcgaccggcgtctcgggccggccactgactccagctctggcttccataagcccctgacgaatcgcacgataggtggcttggcggaagtcgccgccttcggtatgcttcagatgcgcgcggccagccaccaaagtcatcttgatatcggtgagcggcgcgccaacgagcacaccgagatgctcacgctcggtcagatgggtcagaatcagccgttgccaattgcggtccaaatcgttttcggacagggccgaggccaccgtgattccactgcccggctcccccggctccagcagaatatgagcttcggcataatgacggagcggctcaaaatgacccgcaccttcgaccggcgcggtgatggtctcgcggtacaggatggagccggggccaaacgacacatccagcccgaaccggtcgtgcagcgtctgctggatgatttccagctggactgcgcccatcaattgcacatgaatctcggccaaccgctccacccacaccacatgcaacaacgggtcttcgtcttccagctcgcgcaatgcagtgatgaccttatgcaaggtcagatcatcgaactggggacgggccggcgagctattgtccgccgcggtctggccggcggtgtcgttctcctcattgcggccggttcccgacttggcggcatcatgctcggcatcgtcctgattcgcgctgtcatggccagcgccaccgcgtttggctgctcccgaggtgccggccgtatcggattccgctccggcgggcagtaccgtgtaggtcaacacgggttgcagtgacggtgattcggcgtccggttccgctcccagcccttcgccggggaaggtccgcgtcagtccggtcaccgcgcataccgagccggccggcacttcggtgaccgtctcgaatttggcgccattgtagatgcgcacctgatcgactttctcggaccacgccatgccatcatcctcctgagctggcgacggtgctgtcgacgccgcggcgcacgaggatgaagagacgatatccttggctttgagcgcaccgccggtgacgcgcagccacgtcatacggttgtgctggccgtcgtgggcgattttgaacacgcgtgcggcgaaggcggccggccattcacgttcgcgggtgaacgtctccagcccgtccaggaattcctcgactccttcgagtttcaatgccgagccgaaatatacggggaacagctcgcgcacggcgatcatcgatcgcaatctgcccacggacagcgcgccatgttccagatagtcgttcatcgcctcctcgtccagggtggcgatatcctcggcaagcgcgtccaacggcaccgcgctgccctcagtggactgctccattgccggcagcggatatatcgcatcgctcaggcgtttgcgcaactgtgccagaatggcctcgcggtcgaatccggcggcgtcgcacttgttgacgaagatgaacgtcggcacaccgtatctggccagcagacgccacagtgtctcggtatggccttgcacgccatccgtgccggagaccacaagaatcgcgtaatcaagcacacgcagcacacgttcggtttcggctgcgaagtccacgtgccccggcgtatccagcaaggtcaggcgcaggtcgccgtgttccaccaatgcctggtgcgcgaaaatcgtgatgcctcgcgccttctccaaggaattggtgtccagaaacgcatcgccgtgatctactcgccccaatttgcggatctcaccggtacggtagagcagcgcctcggacagcgtggtcttgcccgcgtccacatgcgccacgatgcctgccactatctgtttcatcagctgtgctcccttcccgatgcgccgcgcaattgccggccgcctaaccaatatatccgagaaaaaccgggagggaataattgtaccgtcagaccgggatgccggtacaataagtcaccgaacaccgactgatatgaggagcctccgtgaccacttccggcattaccgttttcggccaaccatcccaacccaatcatggtgccggcgggcgaatcgccatggacgatgccgtcttccccaccgattatgtggcgctggatttggagaccaccggcttttacccgaacagttgcgccatcacggaaatcggtgccgtgcgcgtgcgggaggggcatatcgtcgatcaattccagcagctggtgaatcccttgcggccgattccgcgtcagatcaccacgctgaccggcatcaccgatgcgatggtggccgacctcgatccgattgacgaggtgcttccccgattcatcgcatggctcgctaccccggctgccggtcccgccgtcgagccgattgtcggccataacgtcagcttcgatctgcgattcctggattacaacacccggcatatcgccggctgcggctttgcctgcgcggattatgacacgatgcagatcagccgcgccctgttccccgcgcagcggcatcaccgtctggccgacctgatcgtacgcttcggcatcgcggacaatgaggagcaccgcgcattaagcgatgccatccaaacccagcagtgcttcgaatggatgcggcattatgtcaccgagcatcacgaatccgaagcgatccgctggaagcaggcgccggccaaaaacagcgccgaaatcctccaccagcagttggtggtaaagcggtagtttacagcccgtattccttggcgatgacggaccagaggtcggcagcggcctgatcaacggtttcgttgacgatggtgacgtcgaattcgctttcggcggcgagctccaccttggcggtctccaagcgacgggcctgctgttcggcggtttcggtgccgcggccgatcaggcggcgctcgagctcttcgaagcttggcggcgcgatgaacacgtacaccacttcgaggtcgagctcggcggcgcgctgcttgacgcggcgggcaccctgcaggtcgatttccagaatcgtgggcacaccggcggccagatgttcctccacaggcttgagcaatgtaccgtagtgggccatgccgtgcaccacggcggtttccaggaactcaccggccgcttcgcgggccaggaactcatcttcagtaaggaaccaatagttgacgccatcaacctcgcccgggcgcggagcgcgtgtggtggcggagacggacacccacacttcggggtggtcggcgcgcagcttggcttccacggtgcccttacctactgcggtggggccagtcaggacgattagacggccagcatgggtgttttcagtcatgggttcctccggagatgatgtggtgtgcagcgattatgaatccaatgtggtaacggctcaccggcgagatgaccggtaactgctacagccccgacgaacagggaagaatatgaatcgtgatgcgacgtacgcgatgagatagacacgtacgcatgccgcgacatctgattccgttctgattactggttttccgagccttcgacagtggcttccatcagcgcctgacgtacgtcaagcgcaatcgactcggtggcttggctcagtgcggcgatatccggcccatgcgaggcgataaagcgggacacggtgaccagcacgttgccgcgcgtaccgcggaacacggttttcagatccttggcctcggcaccctgccaaccgtaaccgggggaaagaatcggaccggtgaacttggaggggtccacgccggaatcctgcatccattggccgatggtggcaccgataatcagaccaaccgagcccatgccttcgatatccacgttatgcttctgcgcggtggaggcgatgccgtaggccacggtacgtcccttgtaatcgccgctctgacgcaacgcggtctgcagactcatgccttccgggttggaggtcagggaggcgatgaacacgccgcgtccgttttccagcgcttcggtaatcaggccgttcaacgaacgcgcgccatagtacggcagcagcgtgatggcgtcggccagcaacggtgcaccgggcttgaaataggcgtctgcgatggcggaaatcgtggtggacaggccgccgcgcaggcaatcgacgatggtgatgacgcccatttgtcgtgccgcgtagagcacgcgctcgagcgcttcgaaacctttggctccgtagcgctcgaacatcggcgtctggaatttgactgctgcggcgcgcccgttggcggcctgcagcatacgcatggagaagagttcggcgccttcggcgtcgacgttgtatccccagtcggtgaggagcttgcgatgcgggtcaatgcccacacacagcggcccgtatttggccattgaattgcttaatcgcagaccgaaatccgaacgttgtgcctgcaattcctcactgctgagtgtagtcatcagaactcccgtcgctccaattcgaacagctgcttcgaatgctcctgaatgctcatgatctgataatcattatgcttcacggcctcgatagcgagcagtgcggcctggaactcggtgatggtggtgaactgcggcagatcggcggcaatggcggcggcacggatggagtagccgtcggaacgggagccgcgcgagttcggcgtgttgaggatcatgtcgatcttgccttcctcgataagctgaaccacgttcttgcccacggatccggcagcgtgatgcacctcgaccggggcttccggatcggtatccacgcgggtgctgatcttgtccacgatgttcgactcgatgccgtaacggcgaagcacggaggcggtgccctcggtggcccagagcttgaatccaagctcctcgagacgaacggcgatcaacggcagctgacgcttgtcggtgtcgttcacggagatgaacacgttgccgtgggtcggcaggccaccgtcgtaggcggcgagctggctcttggcgaaggcgtgcgggaagtcacggtcgaagcccatgacctcaccggtggaacgcatctcaggtccgagcaggatgtcgacggtcttgcccaccggggtgcggaagcgcttgaacggcagcacggattccttaaccgcgacctgctggccggggtggatgtcgccgccgtcgcccttgggcagcagcagaccgttggcacgctgatcggcgatggtttcgccggccatgatgcgggcagcggccttggccagtgccacgccggtggccttggaggcgaacggcacggtacgggaggcgcgcgggttggcttcgatcacgtacagcgtgttggccatgaaggcgtactgcacgttgatcaggccctgcacatggcagcccttggcgatggcgtaggtgccttcacgcaggcgacgaatctggtcgtcggacagggtggacggaggcagggtgcaggcggcgtcaccggagtggacaccggcctcctcgacgtgctccataatgccgccgatgtatagttcctcgccgtcgaacagtgcgtcgacatcgatttcgatggcgtcttgcaggaacttgtcgatgagcagcggggagggcaggcggccggagaccacggtatcggccttggcctcggcaagtgcgcggtccacgtacttgttgagctgcttgtcatcgtagacgatttccatgccacggccgccgagcacgtagctcgggcgcacgagcaccgggtaaccgatgcggtgggcggcttccttggcctcttcgaggctcagggcggtgccgtaacgcggggcgttcatctccgccttcttgagcacttcgccgaacagctcacggttctcggccaagtcgatggattccggggtggtgccgagaatcggcacgccggcggccttcagacgcgcggccagggacagcggggtctgaccgccgagctggacgatgacgcccttgaccgggcccatcttcttctcggcctcgtagatctcgagcacgtcctcgaaggtgagcggctcgaagtagaggcggtcggacatgtcgtaatcggtggacacggtctccgggttgcagttgaccatgatggtgtcatagtccttgccaagctcctgcacggcgtgcacgcacgtgtagtcgaactcgatgccctgaccgatgcggttcgggccggagccgaggatgatcacagcctcgcgttcgcgcgggcgcagctcggtttcgtcggcgtagcagctgtagtagtacggcgtggcggcgtcgaactcggcggcgcaggtgtcgacggtcttgtagaccgggcgcagaccgtaggtccagcgcagttcgcggatggtgttctcgccttcatcgcccaaaccacgcaggtgggccacctgcacgtcggacagaccggcgagcttggccttcttgagcagcttcggggtgagggtttcggcctcgcgcaccgtcatggcggtctcattgatgaggaagatctgcttcaggaaccacgggtcgatcttggtggccgcgaacacctgctccagcgtggcaccgccccagatggcgcgcatgagctgcaggtaacggtgttcggtcggggtgtggatggcctcaagcagttcggccacttcttcggcggacggcttctcgccatcccaattgaagcccatgtggcgcttgtcgatggagcgcatggccttgccgagggactcctggaagttgccggccagggccatggcctcgcccacggacttcatggaggtggtcagggtggggtcggcgcccgggaacttctcgaaagcgaagcgcggcaccttggtgaccacgtagtcgatggtcggctcgaaggaggccggcgtggactgggtgatgtcgttgcgaatctcgtcgagcgtgtagccgagggccagcttggtggcgatcttggcgatcgggaagccggtggccttggaggccagtgcggaggaacgggagacgcgcgggttcatctcgatgacgatgatgcggccggtgtccggatgaacagcgaactggatgttgcagccgccggtgtccacgcccacgccacggatgatggcgatgccgatgtcacgcagcttctggtattcgcggtcggtcagggtgaagcagggggccacggtgatggagtcaccggtgtgcacgccgaccgggtcgacgttctcgatcgggcagacgaccacgacgttgtcgttgcggtcgcgcatgagctcgagctcgaattccttccaaccctcgatgccctcttcgatcaggacttcgtcggtgggcgagtaatggatgccggcgccggcgatgcggtgcagctcctcctcgttgtgggcgatgccggagcccaggccgcccatggtgaagctcgggcgcacgaccagcgggtagccgaacttctcggcgatcttgtcgacttcctcgatgctgtgggcgatgtcggagcgggcggattcggcgccggcctcgtcaacgaccttcttgaacagttcacggtcctcgccacggtcgatggcttccagggaagcaccgatcagttcgacgttgtacttctccaggacgccggcctcgcccagcgccatggcggcgttgagtgcggtctggccgcccaaggtgggcaggagcgcgtcggggcgttccttggcgatgatctgctcgaggatcggggtggcgatcggctcgatgtaggtggcgtcagccatctccgggtcggtcatgatggtggccgggttggagttgacgaggatgacgcggatgccttcctcacgaaggacgcggcatgcctgggtgcccgagtaatcgaactccgcagcctgaccgatcacgatcgggccggagccgatgaccatcacggatttgatgtcggtgcgcttcggcatatcacttaccttccttggagttgttcttcataagttcgcagaaacggtcgaacaggtaggccgcatcgtgcgggcctgctgcggcctccgggtggtactgcacggagaatgcggggatgtccacgcactgcaggccttcgaccacgtcgtcgttcagatcgatgtgggagacgaacaccttgccgtacttgccgttttcaaacggcgcgtcgacctgcttgccgatcggggcgtcgaccgcgaagccgtggttgtgggcggtgacctcgaccttgccggtggtcagatccttgaccggctggttgatgccgcggtggccgaacttgagcttgtaggtgccgaagccgagtgcgcggccgagcagctggttgccaaagcagatgccgaagaacgggtagccggcgtcaagtacctggcgcagcagctcgatttcgggaccggcctgttccgggtcgcccgggccgttggagaagaagacgccgtccgggttcaggttctcgatttcggcgaaggtgatggtggagggcaccacgtgcacgcggcagccgcgttcggccatgcggtgcggggtcatgcccttgatgccgaggtccacagcggccacggtgtacagcggctccttgccttcgtactcgccgcacggttcgatggtgtaggtctccttggtggacacctcgtcgtacaggctcagaccctgcatctgcggggtgttcttgacgtcttcgagcagctgctcgatggtcttgagcgcgccggtggcctgatcggtcagggcgtcgccggagaagatgccggcgcgcatcacgcctgcggaacgcaggtggcgcaccagcttgcgggtgtcgatgtggctcaggccgacgatgccgttcttggcgaggtcgtcgtccaggctgccttcggcacgccagttgctcacgttcggagagggatcacgcacaatgtatccggcaacccagatgcgggaggactcagggtcttcgctgttgacgccggtatcgccgatgtgcgggaacgtctgcacaacgatctggcgatcgtagctcggatcggtgagcgtctcctggtatccggtcataccggtggcgaagacgatctcaccggtcgtctcgccgagggcgccgtatggctcccccacatatacctgtccgtcttccaaaacgaggactgcatcgtccttgtcatacatcggaattgcgatggtcccggactcgttctggctcaccaaaacccccttatgtttttcgggtattcgtaccaaggttaacggccagcgcagactcacacgccgttggacgcaaagtctcacccccgctggcggggctgtcggcaaggtgccgacttgagaatgtacggcggcacaagtgtccgcccatgaaaaagcctcccgaatggggaggctgaacaacaaatgactaatcgaccgtcggctgaatctcagcggacggggcagcaggctcgtcggatgcaccggacgaatcgggcgaatcggaaacatcgccctcatcggtcggctcggatgcggcggcagcggaatcggacgattcctcatcggcctcttctgccacggactccggtgccggtgctgcattcttggcggtgcacaccgcagacagcaggccatggatgaaagcgggcgaatcgtcatcgcacagggtcttggccaatgccagagcctcgtcgatggcgaccctgtccggcacatcatcggtgaacagaatctcccaagcggcgatacgcagaatgttgcgatcgaccacgcccatacggcggaccttccaacccgtggagtgttcgtccagggtcatgtcgatctgacgacggtgctcggccacgcccttgacgatttcaatggcatagtcgggaagcggggtctgggcaccgggatgtgcgatgcgctcgtcaagcagggagagaatatcctggcttttttcgtcggcttcgtacagggtgttcagagcccttttgcgcgcggtggaacgtgccatactgctgctgtcctagtcctttatacggtcggtcgtctgttgaggatgcggagatcagttgttctcgcggccggtgtaggaaccgtcctcggtgttgatcttgacgcggtcgccctcattgatgaacagcgggacctgaatctcggctccggtctcaacggtggccggcttggtgccggcgttggagcggttgccctgcaggcccggctcggtgtgggtgatggtcaggaccacggagcccggcagatcgacgctcagcggggtgccgtcgtggaaggagaccaggcagtcggtgccttcgagcaggaacttggccttgtcgcccagaagggtcttcggaaccatgatctgatcgtaggtggtcatgtccatgaacacgaagttgtcaccgtcctcgtaggagtactggagagtgcggttgtccacggtctcgaattccatcttcatgcccgcgttgaaggtcttgtcgacgatcttgccggagagcacgttcttgatggtggtgcgcacgaaggcggggcccttgcccggcttgacgtgctggaacttcatgacggtccacagctgcccgtcgaggttcaggacggatccgttcttgatgtcgttagtagtctgtgccacgttattcacctatttcaaattcaaactagcttaggcaaagcccaaaaattgcctcggctattatgccacaccgggtatacaggaagtgaacgctggggtttcccatgtgcccccggctagactggatgaatatgcgatccttcttcgaagccatatccgtgtcctgcgtcatccccgcgcaatcgccggcggacgacgaacgcacggtgttcgagaacctgtcctttgctgtggagcgcggcgagatcgtcgatctggtgggaccgtccggctccggcaagtcgagtctgttgaccgcgtgcgcccggctcaacccgcatgcgcacggcgcgttcgcccttgaaggcaagggcagcggcgagttcacgccgcagcagtggcggcgggatgtcgcctacctgccgcagaagccgattctgacgggcaagaacgtggccgaggcgatccgcctgccctggacgctcgcgattcgcggcaagggcggcaagggcgagcatctgctgcccgacgagcgcatccgcacgacgttggacgcgatgggctgcgaggacatcgatctggagcgcgccccgcacgacctgtccggcggccaggcggcccgcgtggccctggcccgcacactgctcaccgatccgaaggtgctgctggccgacgaggtagatgccggtctcgacgacgacaacgcggccaaggtggctacgatcatggcggacgcggccgcacacggcatggcgatcatccgcatccgccaccgtccgccggacggacgggccacccgcacgctgacactggacaaggggcggctgaccgaacgcgagatgacggatccggcggcgcaggacgcgaacgcggtgtctgccggcgccgatgaaaatgaggagacgcaggcatgagcggcgatctgggcaattcctacaacatcgatatctggggtctgctcatcgcgctgggcatggtggccgtggcggccatcatcagcgaactgatgcacatgggcatcggcaagaccctgacgtggtcatcgtgccgcgcattggtgcagctgtgcgccatgggcttcatcatcggctacgtgatccggtcgaacagcgtatggatggtgttcgccctgatggcggtcatgctggtggcggccgtgcagatcgtgatgtcccgcgcacgcggcatccccaagggccttgccgggccgatcttcctgagcctggtcatcaccatgctgctgatgctggcgctggtcaccgagctcatcgtgcgcccgcacccgtggtacgcgccccagctggtggtgcccctgaccggcatgctgctgggcaacaccgtaaccgccttggcggtgggattgagccgtttctacgagagcatggaggagcggcgtgacgaggtggatatgatgctggcgctgggagcgaccccgtgggagtcggcccgcccgtccatcgtctcgtcgattcgcctgggcctgctgcccaccaccgcctcgctggcgtccagcggcatcgtgacgatcccgggcatgatggccggtcaggtgatcgccggcggcgacccgctcaacgccgccaagtaccagttcgtggtcctcgacgccatcgccgcgctgaccctgctggccgacggcctgatcatggtcatgatctaccgcacctgcttcaccgccgacgaccaataccgcccgcccgaagcgcgctaatcagctaagctccctctgataggctccctctgataagctccctctgacgagggagctgtcgaacgcaacgagactgagcgagagaccaccctacgcgatggtgaccagcgtgccgtccggcacctggtcatagaaccattgcgcgtcggccacagtcaggcgcacgcagccgtgcgaggcgggctggccgagtttggcaccctcctccggcagatagtcgccgaaggcctcgccggtcggcaccgagtggaacaggtacgaaccgtagaactgcacccaatagtcggcgcccatgccttcttcggcattgtagaagtgttcaccgcgcgtatcgatggtgtacgagccgtgcggggtggcgtcgtcgacgccggtactggcgatcatcgtataaatggtctggccaccggacttgacgtacacccgttgtttggagagactgacctccacgctcaggtcggagtactgggataggtcgggctgtttgccggtcggccccttccagtccacgctttgcgcggctttgtcatcgccgttctgcgtgttctgcgtcttccgcgacccgccctgtttgccgctatcgggaacctgcttgcgggtaacggccgtgggctcgttcgccgctgcggttgcggcggcggatgcggtgtcggctcgcggccagctgcgctgcgccgccgcggtctcgactccggcgccgatcaggcagaacaggatacagcaggcgaccactccgcgccgaatcgcgtagacccgatcgcgactccaattcacgttcaacgtcggcagcctcaccatatgcctcttctcaccacaaagaccattcgggtcgattgtaaacaggcattgcgacgccctacgcctcggtttcagccgtgatctcgactgcaggaacggcatcgtccggggaatcttcgcccgacgccggcaccgtccagcgccgccgcagcagcatccacaggccgatgatcatggtcaccgcaccaagcccgatgccgaacagtcccgaggattgcgccgcgtgcgcggttccctgggattccaaaagcacgtcctgcgtgaccaccagcgagagcatcgcgtcgatgaaggtcacgaacttgaccgacgagtcgatgggattgtgcgttttgtgcgcaataaccataccgcgaatcgcaatcaagaagaacccgcaacttacgcagcagacggtcaagagcctcaaggaggcgttctggaagctgtacgagaccaagccgatcgagaagatctcggtgcgtcagatcaccgaactcgccggctacaaccacgccacgttctacctgtatttctcgtccgtgcgtgacgtgcgtgaccagatcgaagacgacctcatcgcccagcgagacctcatattgaagcagtgcatgcatgacggcacactggaaatgggccagcatgtcggctcgcgtgctgtgttctgtggatgtcatcgtcgtcaccgatccttgcgtgtatcggtttgttgtccgtgtgcacatcacactgtaagcgtttccgcaattgtcgctatcggcgacgcatacgcatgccgatgagccaaatcagagaacgacgtaagtacaacgaaggctcccctgaggggagccttccatcgtgatatacgtcacgcacgagcattcgtcattcgtgcctcacgcctgcgcagcggcggcatccgcggcatcgtccttcagggcacgcagcagggacttgttgcgggtttcgatgatgcgcttgccgtcctcgccctgccaggagaagaagccctgaccggtcttggcgccaaggttgccttccttgaccttttcggcgagcagcgggctcgggccagtgccgttgtccatgtcgtcgaacaggtaggtgctgatgttgtagaacacgtcgagtccgccgaggtcgatgctggcgatcgggccgaccaggttccagcggcggccgaggctgtacttcatcacgtcatccacggtggccgcgtccgcgatgccctgctggacgatgtggaacgcctcgcgcagcacggccagttgcaggcgattgcccacaaagcccagcgattccttcttgatcttcgccggcttcttgccgatcttggtcatgaggtcgaaggtgatgtccaccaccttcggatcggtcttctcgcccggcaccacttcgaccagcggcatcagctgcgcggggttccagaagtgcgccaccacgaagcgctcggggtgtcccatcaccgactgcagcgcggtggggctcaggccggaggtgttcgtggacagaatcgcgtccttgggggcggcgtgctccacttcggcccagacggacttcttgatgtcaaggttctcggccacggattcgatgacgaagtccacgtccgccacgccgcttgcatagtcggcgtaaccggtgatgcgggccagcaccgcgtccacggtgtcgccgtccttgagcagtccggcttcggcgaagtcctcggcatccgaacgaatcgccttcatcgccttctccagcgaggcctcgccgcggccgaccagatgcaccggatatccggccaacgcgaactgcaacgtgatcgcgtggcccatggttcccgtgccgacgttcgcaatcgtcttgatatcgtccactgtctcaatcatggagatctcttctttccggcagttcgtctggcgttggtgtacgcatgaacagcaccgtgccgttatgcgtttgctcgcattctatgccgatttcgctacgtgaacatttactgaacatttcgcggattcgactagtacaaatccccatatcagcacaaaaacgtggtgccgcaacaccgaagtgttacagcaccacgctgaaatgttcatgtcgttacgctgctatcgcgcacccacagcggaatcgataggaaacctcaccggagtaggtgaacacgggggcgaccagcatggacggaccgaacatatactgacggtccagcgtgcggcatgccgggtcatcggggaattccacgaacatggaacgcatgaccggagtaccgttcacatgaggctgcaggccaagctggtagacatacggcatgagttcaagcttgagcttggtgagctcgcgcaccacatccacggcggtctggccgggcaccaatgcgacgccgttcttctcgtcttcctcgtcgaacagccacggcacacggtacacggtggaaccgtgcagtcgcgagtgggagccgagcatgccgaacgccacccaacgcttgtagacggccgggtccgggaacgcaccttcgaaaccgccgatgtcgtgactccagaagccgaagccggaggaggtcagcgacaggccggcacgcagggactgggccatgccattgaaggtggattcgcagtcaccgccccagtgcacgggctgctgctggccgccgacggtggcggagcgcgcatacaggcaggcgttgcccttgccgtaggtttcttcgatggcttcgaacacggcctggttgtacagctgagtgtaccagttgtgcatggagagcttcggagagccgtcatgccagacgacgtcgcgcgggatgcgctcgccgaaatcggtcttgatggagtccacgccctgattcagcagggccttgaccttgtccttgaaccattcacgggcggccgggttggtgaagtccaccaagcccatgccggcctgccagaagtcgatctgccagacttcgccattgggcttgcgcaccagatagcccttgtcttcgtgcaggcgcttcagcgtggattcgatgtcgccgaagaaacgcttgtcccactcgaaatcgcaccaatggaactcacgcatccagtagcagtcgtagtggaaggcggccagcggaataccacgctcggccataccgtcgatgaaggagttgatggcggcctcggtgttctcggaaccgatctcaaaggagacatggccacggttgttgaccagtacgccatacccattggaggtcatgtagaacgggatgtccttgtagccctgttcggaagcagtgccgccatcctcattccagatgtcgacgctctggccgttcttgacgtacgcgccgaagcgttcgcccaagccatacacgtcttcaccaaccgacagatgcagctggatggcaatgaacacgtcggattcatcacgggcggaaccgtccatggtcacaccgaattcgccgaccggctgggcggtgacgttcgattcggcaccgagcttgaatcggcccagcgacttgcctgcggactcagtgagcaccttgccgtcctcgccgatgaaggtcaggttccagggggcgcccttgacgaccttcgcggtaagtccgccagtggtcagcgtgacgtccgcgccattgacgccgacttcgccgtcgccattgccgttcgcctgaacggtcacgtaatcacggttgccgggttcgtcggcattgagcgggaatccggggtattcggtggcgccttgccagtgttcggcacgcacacgaatcacgccttctgccggcgtggtgatgtccacattgaatgtgggcaggttcagggtatcgtatcggccgcgcaccacggaggtcggggcgaggacgttgaggctttcggtggtggcatccgccgccagttcgtaggcttcacgagcgtagagggcgtcgacgccgtcacgaatcatccagtagccgttggtgaacttcattgttgctgctccttggtggagaggtggtttcgaccgccagagaacaaggcggccgaaaccaaaatcaatatgtgctgcttgttgattgaattgcctgttgtacgaatgaccttacttcaccgcgccggtggtgataccgtaccagtcgccggagcccatcacgccttgctcatcgtacttgccggtgtcggccaaggaaccggtgataatcttgtcccaaccatattcggacacgtaatcgttgaggttggtgagcaggccttggctggcgagcaggccggacgtggcgttgcccttgttgtattccgtaacgtccggagcgtcgtcggagttgaggacctgggaggcgttctggcgaatctgttcgaaggccttcttctcgaattcgaccttgacgccggtctcacacattttcatgctttatgcaaaaaatgtgaggcatacgcacatttcccatcaaacgcacaggtgcaagaatggcagcaattcgccatttttgaaatcaccatgtgcgtttgacggcgcgtaagcctcacattgttctcagcaggaccgaatttctgcgagcccccctatagcgctcccctacgcaatatgtccgcaaacgaccacaccacatgggcgatacgcgccaattcggcgtaacggccgatggacagccactgcacacggtaccgttcgaaccacaactccaaatcggcggcaagacgggcgcggcgcgaggcatccagcgcacggccggtcacatccttggtgccacaggcgtcctcaccgccagccaataccagcagttcctcacccagtctattgaacaaccgctgcccatccagcatcacccacagcagctccgggttcaatcctcctcgtgccgagccatcgagcaccgcgacaaccgcactgccgcaatcaatcaacgcccggtcgcaatcccggcgtcgttcgagacgggcatggttccgcaggagcagtcggcggcgcgcgtcggcgcatcccagcgcacggtcaaacatgagctctcccccgcacgaccgttccacatacgatgccacatccgtattcagcatgccggtgccggaaccgtattccagttccagcacttgcacggcgaggtcccaggggaacgacactccatcggagtcgatgcgagcgagtgaatccataagccaaccggattcgtcgccatacgccagattagaaatccgatggttcatttcgcatgcgtcaattgcaatcgggttccacgcgttttgcgcaccgtagcacagtcccggcacgctcaaccgcggatcattgacatgcccatagtcaccccaatcggtgaccaccatgccttccgcaccatatttgagcccagccaccgccatgcggtacgtgttcagccaggcaccgtcatagtcggggaagaaccggctccacgcacgcacggcagggcacacgaattggcggcggccttgtgatgcgatggtctggatcttgctttcgtcgatatccggctcatacatccagttgagcatcgtgatgtcgccgggcagcaagtccatggtgtgcggattctcgagcgcgatatccgcccacagcatcggttgtagaccacgatgggcaagcgtgctgcataggtctttgacgaaaccggcatacagctcatcgcgactggcgcccggcgagtcctgtacggaccggccacggcccaagtcgaaagtctcatcgccaccaatattgaaggaccgcgagcggaacagcggcgcgtattcctcgattaggcgcgaggcgaaatcgtgcgacttggggttggctgcgttcagtgtgtggtgttccattcgttcgatgaaactgaacggacggtcggcgtcttcggggaactctcccagtccacgatgttcacgggtgcgcaggttcatatacatgtgcccaaaagtggccaaggacggcaccagttcgatgccgtggtgtgcgcagtattcgtccaggaacatgatgtcgtcggccgtgagcgggtcagtgccgcgccacgcctcgctgagctcgccgaaagcgaaggcatgttccacgtacagctggaattggttgtacttatacaacgccagctggtcgatgaaccaggtgaggaacgccatcgtcggcacacgcccgcgcgtcacgtcaagactgtaggcgcgcaccgcgaacgcaggcttgtcttggatatgcaggcagggcaaggtccgcgaggtttgcctgatcatctgccgcagtgtctgcatgccgtaccgcaatccgctttcgctgccaccacgcacggcgatggtatctgaggcgaacacatccagcgtgtattcgtcatgcgccaatcgcgcatccacacacagcgatatgacggtgccgttcatcgctgccggcgcacccgcgcccgcacccgcacccacgcccgcatctcgcgctttttcggcggcattggcaccggcgtcggcttcatctgtggctgtgaggactcggcgcgtacggacggcgacgccgcagtaacgctcgagttcgctggacagctgctcgattggcagcgtttcccaggtctcatcggcatcttcggtgacggcatattcgggaattcgtttctcgatcgtcaccaaggacccgatcatagccgtgccatgcgtgtattccaatgtcaccggagcgggaatcagggtgagacacggcgttgcggcatcagccttatattcgaatgtgggcacagctgttcctttcatactgtttttattatcgttcatccgctgacggcaggcgacacgcggtcacgccgccatcagcggacgaatcgtttggtgaggtacggcggcatacgctatttcacggcaccggtcgtcacacccttcatgatgttgcgctggatgagcatgaagaacaccaccaccggcaacgagaaggtcaccgaagcggccatctgcccgccgaaatcggtgcccatggtgggtgtcgagaaggacgacagccataccggcagcgtgtacttcgactggtccttcatgaacgtataggcgatcatgtagtcgttccaggcgttgatgaacgcgaacaccgaggtcgagacgatgccgggcgcggccagcgggaaggtgatcttccacaggatctgccagtcgttcgcgccttccacggccgcggattcgaagatgtccttcgggatgttcaggaagaacccgcgcatgttccagatcgcgaacggcagcaccatggcgatgtacgccaggatcaggccgctgtatttgttgagcaggccgagctggttgtagatgatgatctgcgggatgatgccgccagaggtcatctggatggccagcacgaacaccatgatcggcttgcgcccgcggaagcggtacagggtcagggccgcgcacgcgaagaacgcgacaataatcgacaggacgatcgagaggtgcatgggccagaacacgggggtcgtggtcatgatctcatcgcgcggctttacggcggtgataatcatccagtagaccgggaagaaccatacgacgcagaacagcagggcgaggatagtggtgccggcgcggcgcgcgatcttgccggggttggttcggcggcggggcggtgcagactgcgctgcgccatgcgatacggcccgtggattctcaacacatttcataaggatgacccgctatttcagggattcgccaatatcagcgtgccagtcgccatttccggcgtcggctatggcagcgccaccccttccccaccgtcgacatcgacaaccgactcgcttcacgcaagctgaccgagcatatgttggggcgcgggtatcggcgaatcgcctatatcatcggaccgtcgtacttgcgcgacgccgacgccagcgtgcccgcagctgaccaccgaggtcgtagccagataggcgcgcagagaacggttctcaataatgtctgtgcacacttctctacgcccgaagcacacatggaatatgccctaatcactgccatgtcgccatttgcgatgatgtgagattgttatgttcttgttcatttgagcgcacagatactactgagaaccgttctctgcgcaaatagacaatgtggataactccataagctggaaccacattgccctgcctggcttgcattcaagtccaaatcagctttacggtcgcatcatgagctcttttatgcatgaggatattgtcggccgacgccgagcagaacgtgaacgctgcaatgatgctgcgcgccgttcgaaaggtccattgctggtgggatacatcaatgcggccaactactacggcgcgcccatcccccgacattgcacgctatctgttgatgccgtgcacgcctgtgtttccagtgccaacaaacgcagacgaatcaaaggcgtggtcttccatgtgtttaagggaaaactggatatccgcaaaaaggattatgaacagttctggattgcctcgccggtcatgatgtgggctcagatggcccaatactccacattggaggaacttgcggccattggagcctctttgatgagccgcgataaacggcgcagaatggccactcgcaaggatttcgatacttacttggaaatcagtccgcggttcataggtcgtaacaaatgccacgaggcactgccctacatgacagagaacacggattctccgccggaaaacacgctgtttgggatgctgaaggattcaggcttgggatgccccaccgccaactatcgcgtgaatatcggcaactcatacgtcatattggatatggcatatccggactgccgcgtcgcgttcgaatatcagggagcctatcacgccgatccggcacaaatgcgaatcgacgcggcaaagcgaaacgcattgcaactgctcggctggatcgtcattctcgtcactgcggatgacctgagaacagccgacacgcggcatcgttttatcgagatggcccatgtcgtggtgtcccggcaacgcaatctcgccgattggaaccgctcatgggccattacctcttagcatcgcaccgacaatgcgctatgccgttatttactgcgaggcacccgccagatatcgggctcaacgtagatctcccattcataccaaggcagcgcggcacggcgtcctcgtccatgtgaatggcctgcaggttaatgagcctatccacgccggcagtgcgctccattgcctcgaccaccaggtcgcgggtgctgtggtcaagcgattcgcccaccagcagcgaaccggacttaaacgccagcgccgcctacaaaagtgtgaggctgcgcaggctcacactgccaacagccgttcagccaaccctcggaaggtctggccaatgccatccgtacgcaaagcgccgtcggcgtccagcaccgccggccggccggcctcgccggtctcgcgcacttcgggttccagcggcagctgggccatcagcggcacgtcatagcccagcgcctgagtgagctgttcagacacgcgctgaccgccgccggcaccgaaaatctccagcttctcgcccttgtgctcgtagtagctcatgttctccaccacgccacgcaccttcatcggcacctgcagggccacgagtccggagcgcacggcgatgtcagaggcggagggctgcggggtggtgaccaccacgagttcggcgttgggcagcgcctgggccacggaaatcgccatgtcgccggtgccgggagccaagtcgagcaagaggacgtccggctcgccccaccatacgtcagacaggaactgttccaaggagcgctgcagtcgcggcccacgccacagaatcgcccggtcagcaccggcgaacatgccgatggagatcagtttcacgccccacgcggtgaccggcatgagcatgccattcagattggtgggctgtgtatgcacgccgaacaggcgcggcagtgagaagccataaatgtccgcgtcgatggcggccgtgtcgaagccgagggccgcaaacgtggcggccaggttcgcggtaaccgaggacttgccgacgccgcccttaccggaggcgatggcgaagatgcgggtcttgacacccggtttgctgaaggggttctgcttgcgttcggccttgaggtcggcgaccagatcggccagcttgccacggctcatcgaaccgacttcgatatgaggcagcagctgtgcgcccggataggagctgaccgcgccattgatctggctggtgatggtctcgctcagtgggcatccgggaaccgtcagctcaacgtgcacggtgacgtcgtaagtgccggcgtccgacgatgcgggcgcggcttcgatggcggcaatcatgccgaggtcggtgaccgaacgaccgagctcggggtcgatgaccttgctcaggcgttcgtagatgtcggcttcgatctgacgtgcgtcgctcataaatccgtatcctcctttagggcctgttctaccctagcgtgtgatgcggcggcatgccagagggagtggagtaagtcacactggggcgggattcgctttttctctcccccagtcagcctaaaggctgacagccccctcatcagagggggttaatgaagcgtctgagggggctattttagatggtgccggtggctaggagctgggcgaattgggtttcgctcagcatggggatgccgagctcctcggccttggcggccttggagccggcgtttgcgccaatcaccacgtaatcggtcttcttgctcaccgaaccggccgccttgccgccgcgctcgataatcgcctctttggcggaatcacgcgaatagccctccaatgaaccggtgaccaccacggttttgccggccagcgtctgcggcaacgaactggtctcggcctcgtcgacgcccacgccggcggcctgccaagcacgcaaagtcgcgccgcgccagtcgccgggttcgcgggtggcggcgaaccagttcaccaccgattcggcgatttccgggcccaccccgtcgatggccgtcagatcttcaatcgtggcgttttcgatggctgccagcgagcccatcgccgaggcaatcaggcgtgcggtaggcggaccgagccggcgaatcgacaacgcgaccagcacacgccacaggtcggcgtgacgggccttgtccatttcgtcgaacatcttgcgcgtgttttcgccgggccgaatgatcaccggtacatccgtgacgccagtgcgcgtggtcttgtgatccacgcgcacgataaccgcgtcggccggcacgtcatactcaggataggaggctgcggcaaagcccggcatagtaccaagtggagcctcagccccggtaggtgcgccggtcgtctcgctggcggtatctccctgtgtttcggcagattcgattgcggcctccccttgcgcgcgttcggccagctgcttggccgtgagctttttggccggcgtgggcgcggtccagaaggcaggcacctgatgccacaggccagagccgccgacacgcttacgcacctttttcttcttaccgttcgcaccgaccgtctcatgcacctcgacgattgcggcctcacgccacacgcgcacgtcgcgcagatcggcggcggtcaggttgaacaacccggattcgttagacaacaccggcttctgcgcggccggcaattccagcccttccaccggctcgtacgggtcaggctcttcgccgggggcgaccagaacctcggtgatgttcggcgcgtaggtcgccaccgaatcaggccggttctcctccgggttggtcagagcgatggccgattgttcgcccaagtgctcgatgtcgaacgccttgcgtgaggccagcgaaatcacgcgctcggtcaactgggccgggcagctctccacattcgggcagcgaatgtccttgtcaccctccttggcgggtgacagtttcgcgccgcatgaagggcagaactcgggcatgacgaattcgcgcagctggtcctcacgccctttgcgccgttcaagcaccgggccgaccagttcgggaatcacatcgccggccttgcgcaccaccacggtgtcgccgatcagaatgcccttgcgtttgacttcaaatccattgtgcagcgtggtacgagccacggtggagccggccacgtagacaggtttgagcacggcgaccggcgtcacacggccagtacgccccacctgcacggtgatgttgagcagttcggtgttgacctcttcgggcgggtatttgtaggcgatggcccagcgcggcgcgcgcgaagtggcgccgagggtacgctgcaggcccaggtcatcgaccttgacgacgatgccgtcaagtgcatgctcgatgtcgccacgatgctcgccgtagtactcgatcatgtccaggatctcctggaatgaggtcaccgcacgattgtgcggggagaccggcacgccccacttggtgtatagatcgtaggcctgcgactggtcggcgaccacatcatgggtgccgcgcggatggtccggcccccaagtgagctgccccagaccatgcgcatagaagctcaggcgacgggtggcggtgatgcgagggtctttttgacgcagcgagccggcggcggcgttgcgtgggttggcgaagggcgctcgtccggcgtcctcctgctcgttgttcagggtgtggaagtcatcccaacgcatgaacacttcgcctcggatttccacgaagtccggaacgtcttccttggggccgccgaggttggcgggaatggagccgatggttcgcacattcagggtgatgtcttcgcctgtaacgccgtcgccgcgcgtcagtccctgttcaagcacgccgttgcgatagatgaggttcagggcgaggccgtcgattttgacttcgcagctcatgggcaggggcttggattcgggccaatcgaggtcgcgaatcaccgagtcgtaccaatccttgagttcttcgatggagaagacgtcgtcaaggctcatcatgcggctggggtggcgcacggaggcgaagtcgttggagaaggagccgccgacgcgatgggtgggcgactgcggattgtccagtgaggggaacgccgcttcgagtcgttcgaggcaacgcatgcgcgcgtcgtaggcggcgtcagagctgacgggtgagtcgtcgatgtagtaggcgatctgatcggattccacccatgcggccacgcgagcccacaggcgggcggcggcctcagcggtcatcatgttcacgtcgaaacggtcgaggcgtatcgcgtcgtcgtcagtgggctgcagtgcggctatccattgttcggagccaggggcaaaacgtgcaataccggtatcaggccggacctcggccacatccccatcgtcgaaatcccatgccagttgttcgttcgtgctcatggttgtctatcctagcgggctcggctcccctcggccggctataccgtcaactcccctcaggcggctatgcggatagcgagcgcaggaactgggcttggatgatgtcgatgttatcgccttcgccgtcattcatgcgggccacagccaccgagagcgtgcgggccggcacgaacatgccctcatccacgcacacgcgagcggcgtcacgcacgatgtcagccacttcgatatgcggccagaccggcagatcatgcgtggcaagcacatgggcggcggcctccaccgattcaggcaccggtatgcactgcgagtccgcacgggaaaccagttcctgcagttcgctttccagcgaaccaatggccccgggagcgatgtgatcgctcataatgtaggctgcggcggctgtgtcgaaccggtcgagcatccattcggcgtacgcgaaccggtagtaggcgaacgcggcatcgtcgcggtccaaggccacgcgcagagcattcaggcaggcggcgcgtgccgaatcccaatcctcattgcgggccagttgaatggcgagcttcagatgtgagagcgggtaggcgggcgcgtacgccaccatacggttgagatgcgggatcgccgcctcggcacccttgatctgactcaacacgtcagccagctccatgtgcgcgtagaacagattgtccgggataagcaccgtacgctcgtccaatgtggcgaacagccggttgtagaccacgcgctcggcataggagttgaagtatcgaggtacgccatggcctgccgcatacacctggtccaaatgggccacggccgcttcggccgcttcgatggcctgatcggcttggcccgagaacagcatgtctcgggcgcgcagacgctccttgtcaagatcgtcggcaagcgtgaacgtgaagtccggcgtgtccttgccatcgatcaacgcactggtgacctgagaggccaaatcggtcagttcgggatcgcatatcgattcgatgacctgcatggctcgctgggccttttccacggagccgagcgacgtgttcctggcgatatcgtggaattcgttgacgccatgctgcagcaggtccactcgctggatagccagtccggcactattctgtgcgcccagcacgtgagcggtcgccgggctgaattgacggtcggccagttcgggctcctcctgggatccggtgggagagaaccggctgtccgccaagtcgaagtcggcgctgatgggtttcagaccaccttcgccgtccacgtccatcacggcaccgaacatgcggtaggtttcctcgggattgtcaagcccagcggtgtccagtcgcttgaggaaggcatcacgggtgaaggtgacggtgaccatattgcgcacggtgggattgcggcgcagcacactcatcggatcatcgtccatgccgacggccccatcagcaccgtcagtgccgacgcccccgccgccgataccgcccaggtcgtcgcctgcgccggtatcgtccggcatgccgaacgccatttcgtcgatatcgacgcccttcatcaggtcttcgaactgcgaatcgatggacgcggcgccatcggcgtcagcggattcgtccgcggcctgatccgtagcatccgcagacggtccggtaccgttgccggttcccccggccgtgccgcgttcgtcaccggacgccgtctgcccgaacgtctcctcatgggtgatggggcgggtcgggtcgccatggaaatcaccatctttggggtcggctttggaacccacacgccccaaatcgccactgcgtagatgttcgaaggcgcttagggcctcgctcatcatcgcctcgatggcggaatcctgttcggcaatcgcctcttcaagaccaatggaatcgatgtgcaacgacacctggcgcacggattcgctggtgccgaaacttagcgcggccatcatcaggccgacacgcaggttgtaggcggcgctcatcgacgcgcgttcggcgctgctcagcgcacgccacgtacgtcgagtgctgtcataccggctatcgggcatcatcgaggtgccggcggtggtgaagccaatggccacttcacccgaatccaagcgcgaccggaactccacgtcaaaccgatacggcaaccgtaaccggcgcaacagtgaagagagggtctgacgatacacccattcgtcgctcctcgccggcgaatacgaaggacgagcggcttgagtgttggtgccgctcttatcggtccgttctacagcgccctcagcactctcagtactttcagcgcccgcagcattcgtcacacccgaatccggcacgttctgctgggtcagcacatcttgaggatcggggaattcactgcgaatctgtccagccgtgcgtgcggcgatatcgaccaggctcagcacggcccgacgctcctgctcgccatcatacgggtcaagcgccataatcgcagggttttcgatgagtttcatgtcgatttgcgcggcctcggcacgggtcaccgtatcttccgtagggttgcgtcccaaggaagcgttgcgctccaaccaagcgctcaccgcagcgaatcggttgaggttgccttcgatcttcaaggatttcagcgcctgcccgaatgccaaggacttatcccacgtaaagaaatagccgctcgaatacgtcgaggtgtacaggtgcaacggttcggcgccatgcaccgcttccagtcccggcgtggtgtcgagagcgccggcttcgcgcatcagatcggcgaaatgatcctccagaccggaggcccgcatgccgtgggcacgtgccgccaaagtgtcacgcaccgaacgtcgaatcgcaccgattggcgcctcacggttgagacggcggaagatattgccggaaccgaatccgatgagcagaccattgatctgcggcaacatatacgtggcgaagaacgcgatggtaatggcatcgcggtattccaaatcatgacgcatcgcaggcggcagattggcacgcatctgctcaagcgtgtaccggttgccggccttgagccatgaggcgagccacgtcatgcgtccggtgtcgtcacgccccaccacgccaccggtaatagccttcacaccgtcagcaccatgaccaaggccacgccccaaaccacgcccatgatgcagcgcacttcccaagccacggcctgcacaggagaaaccggaacgtgaacgcggctcgtcgctttcgcccagccgctcaccgtccggcaaagtcacttctttttccttgccgaacatgaatcgcgcctgcatatcctgcacgtccatgtcggtgtcggtgcccacgaatacgcggccatgcgtatcggcgaacgccacctgcgcaaaatgatcgcggtcggggaaaatgccaagcgagaagccgcggcctctggtggagggcagctgcgcccatccaagcaccagcccttccggcacgttctccaattcggggaaggtgcgtcgcttgattacagggctcagcgccactgcatggcgagtcagttcgtcgataatgccgcctttacgctcactggtctcctgcaaggcatcgccgaacggattcgtatcgtgcttcttcggcttggacagtcccagatcggccgcgagcgcgttcatcgaatccttcagtccgcccagcagtggcgtgcggttgtgcttcccatggtccgatgtacgttttggcatgattcacattgtctcttgtttgcccgacatcaagcccgaataaagcctatagaataaatgcgtgcattccatagaccacactcgcgcagactgtccgatgccgtcgaatcatgaacggcgcctgcccagccgtccggatacccggcaccggctgcgtttggtgcgcctgctgatcgccttgctggccgccgtcgccgccatcgccgccatggagtgcatcgtgttcaacctgccgttctggcgtacgctcggagcgagcacggatacgaacgccgtgcataacacgctgggttcgggtctcacgcgccggaatgatggcatgttgaccgtcaccgatccgaccaaggcctatcttgaactgaccgcggacggcacgtcggattacctacgcatcgataccgcgagcagcaaggtcatcgataaggcccgtgagcaggccgaggccgaatccgaagcgaacgacgataaggaagtcttcaaaccgctggcggccattcatgtgcgcgcggatgtcgatggcatcaccggccaggcccagtcgatgaatcccgacgctattcgcagccattatgtcaaggcaccgggtgccggcatcgtgcgtatttggattcaggaagagcgcggcgcgatcgtaccggtcaccgactcccgcgccaacgtgcgcgtaccgttcgtcatcaattggatgcgcgtgctcgccatggccttggtgttgctgatgattgccgtctggaggccgagatcgcgcctgtggcgtatcacgcttgacccgtccagcactcggcaacgacttgctttcgtagggcttatggcgattcctaccctgcttatcggcgcatccatcatccacgaactgtggtacgcgtctccgctcgtcttccacgtttccggcgattacacctatgatttcgaccagtatgggcatgtggccgatgcgctggtcgccggccggccctggctcgacttgccggttcccgaacaactggccgccaccgagcacccctatgacgtagccacacgtgcccagctactcgccaatggagccagtccgctctactgggattacgcgtattatgacggtcactggtattcctattttggcgtgttgcccgcagtgctgctgttcgtcccctatcgtctgctgaccggtcataatctgccgacatccgccgccgagtatattctcgtgctgctgttcatcatcttcttctccttgctggtgctgcgcgtcatccatcgcgtgatgccgaagacttcggtggcggccgcgtcgttagtagtggtctcatcgttggtgagcgcgcaagtggggtatttgctgtatcgcacgaacttctatcagataccgttcgccgcatcgctgacgttgacttcgctgggactatggctatggctcggcgcggacacgtcccgccgtccgctgagaccatcggaccgatggcaggcgggcgacgccaagcctctctccctgccacgactggccttgggcgccttgtgcattgcggcgaatttcggatgccgaccgacgttcaccttgaccgcattgcttgcgttccccctgttctggccgcagattcgcgcgctgggcaccggtctgcgcacacgccgtatcaagccgttgcaggcgttgcgcgcgccgctggcggtaatcatccccgccattctcgtcgtgacgcctctgatgacgtggaacatggttcggttcgattccccgttcaatttcggcaatgcgtatcagttctccatatccgatatgacccggcataccaccccgtccgcggatatgcccgccaacatctggtattacctgttcctgccgctgcgcttcatggatcgtttcccgtggctggcgggctctcccgccccgatgccgcaatggggctattacgaggtgatggtcggcgcgattttcacggccacgccactgaccttgatggctttggcgctgcccctgctgcgcagattggagacgcacggcatgcggccatggctgatgtcttgcttggccgtggcggcggtgctggtcgtattcgacagccacgtcggcggtttgggatggcggtattccgccgatttcggctggctgatctcgctggcgtccataccggggctactgtggctggtcaatgggcgcgaaccgagccgctcattggcgggggccaacgacgccgcttcaggcgatggcatcgcccgcgtcactccgtggcgttggctgatgcgctgggtcgtgatgctggccgtattgtgggcgctgggcatagccatactaagttgcttcgtgcagtcgcgcagcgattcgatgatcgccaacaatccgacgctctggcatcaggttcagtcttggttcaccctgctataggaccgggccgctcggcgacccgccaagcttcagtattctcccagcattccggccggtgttttccaagacctgcggcataatgtatgtgacgtaattcactaatcgtttacccatactgtcgtgagggtttccccgtgtccactgccgtccgtagtcgcgtcttcaaaatatccgcagcagccgtcaccgccgccatcgccattggtctgtgcctgttctcacaggacgacgtcagcgcctccatcaaggaacgccgcgtggagcggctcaacgcccagatcgagaacgtctataccgacgaataccagcagatgatggacaccgagatcgccgacgagcgcgacgccaaagaacgcacggtcgacagcatctacaccaaggtgaacccatacggcaccaacaccacgtccatgtacgtgtacttcaccaccgatcaggcctccaccgtcagctacaccgtttccgctgaggggtacccggattacacggccaacgccatcaccagcgatgaggcggccgccgcataccgtgaggccgccgccggcgacgccgacggttccggcaatgtcggcggtaccagcacggcgagtcagatgaccacggtatcgagcaatgacattgcctccaccgagcacgagtttctggtgttgggactgatccccaaggtcaagaacaccattaccctgaccatcaccgacaccgacggcaacgccaccacgcgcaccatcgagcagaccggcccgaaactgctcggcgaggaggaagtacggctcgaacaggccgtcgcccccgacgaatccacggtcaccatgctcggcaatggcctgtacgcgattctcggcaatgattccaacgagcaggatttcatgtactactatgacgcgaacggtgtgattcgcggcgaaatcccggtgctctactaccgctcgcaccgtctgctgttcgacaatgacggcatcatgtggttctccgcctccaccaagcatttcgtcggcatgaatcgtctaggcaagctggtcaagatcatcaatctgggcgaccagtacatcctgcaccatgattacgcgctggattccgacggcaatatcgtctctctggccaccgatctgaaacattcggaccatgccgtgcaggatcaggtcatcaaggtggacaccgactccggcgaggtgagcctgctggtggatttcggcgacctgttccccgattacaagcaatccaccgatcattccggcatcgacgaatccgatccgaccgccacgaaccgctgggactggatccacttcaacaccatccagctcatggatgatggctccgcgttgctgtccgcacgtgagacctccacgatgatcaagatcgataacatcgaaggcacgccgtcgctcgactacatgatcggcgagccgagcgtatggaatggcatggatgcgcagccctccttcctgaccaaggtgggcgatttcggcgacaccggcggccagcactcaatcactgtgcagtacgattcctcgctggaggacggacagtactacatctacatgttcgataacaacttcggttatgccatgacccgtcctgatttcgattggaccatgatcgatggcatttcgaccgcgcagagctccaaggatgagaactcgaactcccagttccgcaagtacctggtcgacgagaacgccggaacctacaccgaagtgcaggacttcgatgtgccgtattcgccgtatgtctcctccgtacaggaactgtccgatgacctgaacctggtggacaccggcatgcagggcctgttcggcgtctacgatgacgacggcaacctcaaggcacagtacaagatggtgctcagttcgggatacatctaccgcgtctaccagtacggcttccgcggcttctacttcgcgtgagccttggcatcgacctcacggccgatgccaatcccccaacggccgattcctatctgctaccgcttcgcggcctcatacttgcggcgaatcagatcctcataaaacgccacagcctcagccggcgctccgtcaaacgcgaccgcgtgctcatccagcaccagtacacggtcgatggcgtattcgggccggcggatcatatccgtgtcatgcgtggcgaaaatcacctgcttgttgtagctgaacaacgccttggccacatgcgcggtgccaatctcatccaatcccttgctcggctcatccgccacaatcgcactcggctcaaagctcagcgcggccgcaatagccagcaggtgccgtttctcggagtccagttcgctggccttggccttggagacctgcgccaaatcaaaatgcgcgaacagattgccgatgcgcgcatgacgttctgactcgggcaccttgtgctttttcagcgcttcggaaacagcctcggaaatattcgccgcttggtaaaagctgttcggaatttcctcgcggcgaactttgccgaccagattatcgatgcgcttcgcgtccttcttcagagccgggtcaagacgttcctcaccgcccgcaatggtcaccgtgccggcgttggccttcaacgaaccgtccagcagacccagcaatgtggatttgcctgcgccgttcagtccgatcacggccacccgccgctcgctgatggtgatgtccgtgggagcaagtcccacgtgcccatcatcatacgtatgccctgcctgatccaaagtgaacgtcagcgatgccgggcgtggcagttctttcggtctaaacaagaatcccatgccgctattgtacgtggagtacaggtgtggtgccggcaaacaccggcctatcgcagcaaagcggcgacggtattgagcacggcgcggatgccacgctcgaattcgtccggttcgggtagcagggaaacggccaggtatccattggaagtcatgtcgaagaagtagccgggctgtccggtgagttggtgctcgtcaatcaaccgcagcaccagttcgttctcatcgatgactgaaggcactcgtagcagcacgttccagccgccttcggcccgtagcacgctgaccagcccgttgggatcggcgtcaagcaactcgtgcaacttggccaggttattgcgcacgcgttcccccacccgtctggtctgtgcaggcgcggcgttcaataatgcgggaatccgttcggcaatgatgtcactcatcggcagataatcgtcggcgatgacgtccagtcgacgctgtgcctcggcaacgtcctcgtcgggtccagatacctgaatccacccgactttggcgtgcggcgcggccagcattttggagaatccgtctagggcgaaggtgagcacgccgcgctcccccgcgagccgtgcgttgccggggaaaggttcgagagagtaatcgaagaacacttcatcggcgataagggcgatgccatgttcacggcacaatgtcacgatacgtgcacgctcggttggttttacgtacgaaccggtcggattgttcgggttgatgagcaccaatgctctgatgcgttcgccaccgggctcgctgagcagccgctcgagttcggcgatgtcgatgaaccaggagccgtcgaattgcaactggtattcgaccgtgtcgacgcattcaagccgtgcaatcgactcgatcagcggatagccgggtttgggtgccagcaccgcgtcgccggcatcgcaaagtaacttgatcagccacgaatacgcctcggacgtggagctcagcaagtacaggacgtccgggtcaacgccctcgatggaggtattcgcattgttgaaagcggcatggcgctcgttcccgccctcgatggcggcgggcgaagccaactgagggctgcttgcgtctaccacgtttgccgtattgaggaatgcggccaatgcttctcgtgccgcacgcggtccacgtgggtcggccgtatacacgctcggcaccaattcgggtgccagcccgtggcgggtcggattggaatcgttgagtttgctgagtgcgatgccgtttgccttggctgccgcctcggccgccgcaatgggattcggcgcagaaatatccacacgagaagagaaatgcacgctcataccctcccacgatagagcgtggtgccccctgtcccgctctcaatcgcgcaacattcccggaaatgcgtcgctctggacccgaatcacaccctcaaacgcggcacattcccgggaatgcgtcgccacagatctccatacacacgctcactttgcgcaactttcccgggaaaatgggggctgcggacgttttcttggagaccgaacggaaggattttcgtatgttcagtcttgaggaacgagagcgtgcggtggagttgtatttcaccacgccgatgacgacggcccaggtggtggagcatctgggttatccgaccaggcagtgtctggagcgttggctggcgatggattcccggtatgctggccatatggccaaacccatcatcccactggagaccaggcgaagggcagtcgagctggtgctgggcggcatgcagcagaagcaggccgccaaacagctcggcgtgagcgtcggcgcggtgcatggctgggtcagggcgtaccgcaagggcggcatggccgcgttgcagcccaaaaacaggaactccgcgcagggcaataagcccgcggactcccgccgccggccgtccgcagccgatgatgatgacgcggaggctttgcgccgcagggtcgaggaactggagctggagaacgcgttgatgcgggaggtggtggaggtcgtaaaaaaagaccccggcgccgacctgcggcgcctgtcgaacagggagaagaccctgttgatcgaccggttgaggccggcgtattcgctcagctcgatgacatgcttgctcgccatcgcgcccagcagctaccactaccaccacgcccggctcggcgttgacaagtacgccggactcagggcagaggtggccggggcgttcgccgattccaagggcaggtacgggtaccgcaggatcaaggcggtgctcaagaccggcgtatcggagaaggtggtccgcaggatcatggcggaggaagggctcgtggcgcacgtgcccaagcgacgcaggtatagttcctacgagggcgagacgacgccggctcccgccaatctcgtcgaccgggacttcacggccgagcgtccgaacgagaagtggctgacggacatcaccgagatcaaggccagggacgggaaggtgtacctctcgccgatgatcgactgcttcgatggcaagatcgtcgcatacaccgccggcttcagccccaacgcggagctggccaaccggatgctggagaaagcggcctcgacgctgccggggaacgcgcgtcccctggtgcattccgaccgtggatgccattaccggtggcccggatggctcgggctcatggaacgcttcgggctgacgcgctccatgagcgcgaagggctgttcgccggacaacgcggccgcggagggattcttcggcaggatgaagaccgaggcggtctaccccgagaagtgggaggaacacacccgcaacgaggtgctcgccttggtcgatgagtacatacgctggtacaaccacgagcgcatcaaacagtcgcttggttggatgagcccggtacaataccgtcaaagccaaggaatggctgcgtgattatctccaagaaaatgtccgcagccccttgagtcgcatacctttcctatgcaatgcgaaaggccgcccgactagtcggacggcctgaagcatattcgcgggtcagcgctgcacacccacgctcactggctcactgctgcttggtgctggcatagtaggcggcaccgacgatgccggcctggttacgcagcttggcgggcacgatcggggtcttgatatccacgtacggcaggaacttttcgctctgacggctcacgccgccgccgacggtgaacaggtccgggttgaagtacttctccatgaggccgtagtacttggtcagacgcttggcccacttcttgtagcccagttcctcattctcgcgaatcgcggaggaggcatacttctcggcgtccagatgcttggcgctcaggatgatgtgtccaagttcggtgttcgggatgagcacgccgttgtaaatcaaggcggtgccgatgccggtgcccagtgtggtggcgatgaccagaccatcctggcccttggcggcaccgaactggacttcggccaggccggcggcgtcggcgtcgtttaccacgacgaccgggcggccgcaggcttcggagaacacttcagtaacatccacaccaatccaagactggtcgaggttagccatgaagtcgagcttctggccgggcttgatcggcgcggggaaagcgatgccaacgggtgcggattcaggcacttcgaagtggtcgagctgctgcttgacgattttagccacggcctgaggagtggagacctcgggagtgagaatcttcaatcgcggctcggcgaaatcgcccttggtcagatcgacaggtgcggccttgatgccggaaccgccaatgtcaacaccgaaagcctgtgcagtttcaatcatcgttgaccttcctttccatacgttttcatcagttcgtaaggttgcgcccagtttaacgcgaattacgctcaacacgaaaccattacacaccaatcatgcaaacgtgtgcatcgtcgccggtcactacgtaccctattcgtatcgtttttcaagcctgacaatgggcaatgcatgcgatttcgcatactaggaaaaatcggcgtctatggcggactgactctgtgtcgcgcgcgataatgagaggtatggcagaacatacccaacttattgatgcaattaacatccgcaccgccgtacgcgcctacgatgatgagccgatcgacgacgatacggcccgccagttcgagatggcgcttcagccgatcaacctactcggcgatctcaacatccagctggtgcgcgaccagcccaaggtgttcgccgaagccaatgcttcaggtcatctgaccaatgcggcgaattatctggccatcgtcggccccgtgaacgatgcggaagccaaagagcgtgccggcttctatgccgaacgcatggtgctcacggccacgttgcgcggcctcggcaccttatgggtcgccggctcatgggacaaggcggaggcggccaagcattgccgcgtcacctctggccaggagctgtatctcggtgtggtgatcgggcatccgaagaatcatctggattatcaggcgaaatcctatgaggagctatgcgaagcgcaacgcacgcaccgcgccaccaagacctatgagcagttcaccgccacaatgagcgatgaggggcgcgaggccgctccggattggttcaagtccggcgtcgaggctgcgatgaaggcgccgagcgcgatgaaccgtcagccaatcaccttctcgtataatccggccgacgataccgccgccgcgcatatcgatcagagtgcgggagatgagcatcacgcgttcaatgacatgggcatcgccaagctgcacttccagatcggtgccggccaaggccagtgggcttggggcgacggtggcctgttcatccataagtaacctgtagtgacccccctcatagaggggagccactactacggctacttcagcgacggcatgggcttccaggtggggtcgtgcatcagcttgcgcgagtcccaccagcccttggcaatctgtaccaaaccggtcttgaggtgctcgcgatccaccatcaccaggcgaatgacttccttggccgcggtgagcacggtacccagtccaaacaccagcggacggaagtcaccataggtcatgaagtaccgggccatgtatccgcggttgcgcatgatgtgataccggttcatgtcggatgtggagttgagctggcgcacgccggcgatatcccaattgccgatttcgcgcgtacggcgcaggatcacgtcgggcaccacaatcgggttggtgaccttgctggcgcggtagccatacatcgtgtcatcccagtagatgaagaagcgcgggtccggcagaccgatttccgtaaccacacggcggttgaacaggccgccttcgaagcacagcgtgtccatcactcggtatccggccgggccgaatgcggcgggcgcaatcgggttcgggatgcccagcggcacaatgaagtcgtactgccagtagaacgggccgccatcgtagtcgaatcgggagccctgaatcacctcgtgcttgtcggtccacttggacagcttgtcaatggcgtccggcagcacggccacatcgtcatccatcacccagaaccatgcggcacccagctcgtaggctttggccacgccggcggagaaaccgcccgcaccacccaggttctcggtctgcggcgcatagaccacacgttcttcgttaccggactggtcggccacggtggtgccccattggccggtcaccttgccggcaaacgcagcgaccatgtccgccgtctgatcggactgctcattgtccacgatgacaatgcgccacggtgcctgttcaagcgccagaatcgaatcgaacagtgtctcaagcaactgctgacgtttgtaggtggtgacgatcagggcaagcttgtcgatggtgttgttgggtttcttcacttcagccatggctcccattgttgcacttgaccggcacaagacgaatttctgcacagtgaaacgcgggttgcatacgtccggcgcatggcgtatgaataagcctgtcagtttcagggaaggtgcaattccttactggcggtaacctgcaccccgggtttcataacggggatggcaggaagcccgcgacccgcgcaagcggctgatccggtgagattccggagccaacggtatagtccggatggaagaaacgagggctcattatgagtgtatcttcgcgtattcgcatgcaagttgttcgttctgtggcacccgaggccgagggttcggccagcacgtccaccgccagcaccagcgccaaacttggctcacacaccactggtgtggccgattctggccgctggtccacgcgccgtatcgccatgtatgcactgttcgtggcgctggcgatggtcaccagcttcattgaattcccgattacgccggtcacttggctgaagtacgacccgtccggcatcgtctgcctgattgccggctttgcgtatggcccggccgccgccgcaatcgtgtctgtgctcggctttgtgccgcacatgttcgccaatccgtggggttcgctgatggctgtgctggtggcgctgttcctgtctgtgccggccgcgttcatctaccgtaagatccgtacgcgcaagggtgccgccatcggcattctggtgggtgcggtgctggccatcgtggtggcgctggtgagcaacctgattgtcacgccgatttacgcgcacatgacctaccaagctgtggccgcgatgattctgccgattctgctgccgttcaacgtggctaagatggcgattcacgccgtgatcaccttcctgatctacaagccgatctccaacctgctgtccaagcagcagtgactggcctgagacgggccgatgcccgccacgactaacgaccactcaaagaccactcaaagaaccagaacgcagaatcccggcacgggccgggattctgcgttttcgcctatcagttacggattgctgtttcatgaccgttgcaccccattccttcgacgccgacgagttccacgattctgccgaacctcacgcttccgccgagcctgcctcccccgccgccgtgctcaaggacattcgtttcagctatgaccgcggcacctcatgggctttggatggcgtttcactcacggtccatgccggcgagcgcctatgcttggtcggtccgaacgggtcgggcaaatccacgttagcccgtctgattgcgggattgaccgcgccggacggtggtgaagtgacgttactggggcaacgcgtgtacgcagccggcccgaatgccgatgcctatcgtgctgcccgccacggcatcggtatggtgttccagaatcccgaggatcagctggtcaccaccgtgttggaggatgacgtggcctttggcccggagaatctcgggctggagcgcgagctcatcggcgagcgtatcgttgattcattgcaggccgtggggttggcgaacttacgccagtccgacccgacccgtatgagcggcgggcagcagcaacgcgccgccatcgccggcatgctggccatgaacccggcaatgctggtattggatgagccgaccgccatgctggacgaatccgcacgcgccgaagttatgcgcattttggatgatttgcaggcgcgcggcaccactattgtgcatgtcacgcatcatccagatgaaaccgttcatgccgatcgcatcgtgcacatggaggccgggcgaatcattggtatcactgcagccgtcgataatcgatccccgctagcggaggctgtctcgcaaagcgagactgagggtagtatcggcacagaagccgcccccagtcgccctacgaacgacagcccccgccagcgggagcgcgaagacggctccgaactgccgctgctctccgatggcatcggtgatatgacgaaccccattattcgcgtctcgcatctgacctatcgctatccttcggccaaacgggcggttatcgatgacctgtcgttcaccatcgcgcgcggtgaaaccgtggcactgatgggcgtgaatggttcgggcaagtcgacgctggtgcgcatgttgtgcgcactgactgcgccgaccgccggcagcatcgaagtggccggtgttccggtggcctcgaccggcaagcgcggtcgcaacgtgcgcccgaagtcggcgaatcgcaagcaattagcgcaattgcgccggcatgtgggttacgtgatgcagcatccagagcatcagctgttcgctgacacggtagccgaggacgtggcgtacggcccacgcaaccaagggcttggcgagaccgaggtagccgaccgcgtgcgcgaatcactggaactgctgcatatcgggcatcttgccgaccgctcccccttcgacctgtccggcgggcaacaacgattggcagccattgccggcgtgctggcttgcaatcctgacgtgctcatcatggacgagccgaccgcgagtctggacgcccaagccaagaagcgtatccatgagctgttgcgcacgctcaaatcgcgtggcgtgaccgtgctcatcatcacccatgaccgggaggaggccgagcaaatcgccgaccgcgtggtccgtatgccgattgccgcccccgcatccggcggccccgtcacggccaccgtcaccgagccggccgtatcctccaacggccctgcgcactcagtgatacaccgacttgacccgcgcgtgaagatggtgggcttcctggccgccatgttcacgatgttcgcggtgaacacgccaacccagctcgcgctgggcatcgccatcaccctggccgttatcgcggcggcacgcctgaacccgttacgggtgcttgaatccattcatccgattctgatcctgctggtgctgatgggcgtggtcaatctgtttgtggtacgcaccggcacgccggtggtggcgcttggcccgctaagcatcaccgatcagggcgtgaccatagccgtgctgtacgcctgccgtttcgcattggtaatcattctgggcgcggtgttcctcactaccaccacgcctaccgccatgaccgacgccttcgccaccttgatcagtccgctcaaccggctcggtatccatgcccaagaaatcgcgctggtcatgagtctggcattgcgattcattccaacgctgaccgacgaaacccgcgccatcgtcgacgcccaatccgcgcgtggcggttccatcgaaaccggttcactggcccagcgcatcaaggcgatgagcgcgattatcgtgccgattttcgccggcacgttgcgtcacgcggacaacctgagcctcgcacttgacgcccgctgctacgaggagggcatccgccgcacccactggcgtgccctgaccatcgccgcgcgagatctcatattcgccgctgccgtcatcatctacatcgcggccatcatcgcgctgtagggcggcaaacagcgcagacagcaccggttgctatgctggtgtggttatacgaaagatgtaaggaaattcccatggcattgaccaagaagcaaatcaagcagctgcgcgcgatggcgaactcgctgaagcccctgttctatgtgggcaagaacgatttgaccgagtcggccgtcaatcaggccgatgagaccattgagaagcacgagctcatcaagtgcgccgtgcaggacggttctggcctgaccgccaaggaagccgccgccgagcttgccgagcagctgaacgccgaagtggtgcagtccatcggcaatcgtttcgtgctgttccgtcgctcccggcgcgacgatgtggagcatatccgcttggtgcgcgagtaatgttcgccccgctcgatcccgtagcttgatatgagtaatggcggttggaatcagtccgattccaaccgccattactcatattcgcccagcgagcaccgtcactgatccaagatggacccgacgattcccgcaacaatggtcaggaccaaggaccccagtaccgaccaccagaaaccgtgtacgaagacgcccacgccgaacagactgaccgccagccagctggcgagtcgcatgaacagccaattgataatcaaggtgaccagcccgagagacagaatcgcaaacggcagtgcgatcagatgcacaatcggcttgattgacgcattaatcagcgccatgaacaaagcgaacgcggcgatgccgagaatcggaggctcccccaccggggtcatgccgggagtcaccgcgaccatgacggcggcggcgatagtcataatcaaccagctggtcaggaaacttctcatggcccaatcgtagcgcggcaggttttactattgggcaaaacatgagatgatgttgtgcagaaacggtaagaaggtattgccgttcccgattgagaggggactgacccgcatgactgataatcaacaacaaccgtacggttcggacagtgttccgcagccggcacagcccgcacagccggcacagccgtcttacggccaagatgccgcacagcagccgcagggctatggcgccccacagcccgccgcatacgctcaacccgccgccggaagctacggccagcagcaaccgcaatacggccagcccgccggcgcatacgctcagcctcagtacggccagccgcagtacggccagcccgcacagcccgcagcgggctacggccagcagcccggctatggacaggcttaccagcagccgaacgcctacgcgcagccgcaatacaccgccgctccgtatgccgccgccccggtggggcaatcgtccaagtccaagctggctgccggcctgttgggcatcttcctcggcggacttggtgtgcacaacttctatctcggcaacaccggcaaggccgtggcccagctgctgctgacgcttgtcggctggattctgctcggacttggcccaatcgcagccgccatctggggctttgttgaaggcatcatcattctgtgcagcaagcccggctcaccgtggcataaagacgccaacggctacgaactatcagactgaaactaacctcgggccacgttcattgggcccctgatcaaccacgcctctgcaggtgtcatctcgatgccgcagtcgcagcgggatgcgacacgccggccgtgtacatgagttcatgtacacggccgttttctttgttgctttcaccctcaaaacaaacatttatcatgttcacttttgcaagatatgaacatcagacatcacagactaccataacttcccaattgcattaccaatagattaataaccggcaaaacggcttatatccgccatttttcatgctaggctttgaaaccagcacatcaacaaagtgcacaatccttttctacagagaaggtaacatgttgttcaattcatatgtgaatcgaacaatgccagtacttccctaggtgcttgcttggggaacgccatgctgaaaggaacacattatggcggagggaaaagtcatcatcgtcaacccggatatgttcggcaaggacccggattcgaaaacaaccaaggccaatgaagtggccaagagcttcggcctgagcgacgcggcgttggccgaggtcgaggacttcaaggcacaactcaccaaacacaacgcctgggatctgccgttcatgggatacgtcaacgaggatggctacggttacgcctacgtgcccggtgccgccgtggtgtacgacccgtactgggacgcccaccaagcattcctggcgctgcctaaggacgtgcagaccgcattcgccattcgtatgctgttcacgcaccgtccggtcgaccgctatggcgccagcatgttcctgcattaccagcgtggcttcaacgtgaagttcgagggtatcggcgcgaaccagtactgattggtactgactatcaaccatctttttcggattgcccgataaggggcgtataacaacggtgttatacgccccttatctgtattcagtgtcaggcgatggccgcccgccgcccgacacaggcgaatcagtatcgcacgagattcaacagttcctgctgtttggcatagcgggaaacgttggtcagggcgatgcggatgatgtgttcggaagtcttttccaaatgattgccgccggccacatgcggggtgatcaggcaatgcggctcatcccacaacggactttccgccggcaacggctcaggctcggtgacgtccaatccggcaccgtggagccgtccattgcgcaaggcgtcagccaaggcctcgggatcgatggcgtcaccacgcccggcattgatcacgatggctgtggatttcagacgacccagacgatccgcattcagcagatgatgggtctgcggcgagcgcggcaccgccatcgccaccacgtctgccaatggcaacagcgcctccagccgctcgaagccatacatcttttcaatgcccttggccggcacgtccgcatgacggcgcacgccgaaagtacgcatacctacggattgggcaagctgagcgaaatgtgacccgatgtcaccgacgccgataatcagcgcgatgccaccttccgggctcaataccggtccttcatcctgccactgatgatcacgctgattggaggcataccggttgaggttcttcatcaatgcccacatggtggcgaacatgtgttccgacacgctttggccatacgcgccgctcgcattggtgaccatggtgccgcgaggcagcacacccgggcagatgtacgcatccacaccggcgctgaaggtctgcaaccattcaagacgggtgtattgggaagcctgcgagaccggaaagttgccgatgactgcggtagctcgggagcgaagctcctcgggaacagcggccgaccagaccatgtcgccgcggtgcgcttcgtcgcccacgaattcctgcggcacatcgcgagccgccttggcgaaagcccgccgttctccttcgttgagtggcaggcagttgacaatcagcttatgcgtgttctcaatacccatggttcaccaaactaggcggcagggcagatattatcgcggtttcctcatgctgaaccaatgccgaactgctaccggaccaatgccgaatccgccccatcaaaccccaccaaaccaagggacaacccattgcgcatcgaccgtagcgtccgccccgaaccgtacactcacaggtggttttgtgattccatagcgtgcagccaaggcagtacgattgccggtttatccgcacgcacaggtacctacgccggttggtaaaccttacattccataccttgcaaccgaacgtttaggagcatgtatgcctgagcagcatattgataacgagaagattcccacacgtcttatcggcgcgattgtggctgtcggctcacttgccttcattggcattctgaccgaaaccgtgatgaccgtgcttttccccgcactgatgcgcgaattccatgtcgacacggccactgtgcaatggattaccacgatttatctgttggcggtggccgctaccatgcccatcagctcgtttttgaagcgccgattcgcgctgaaaaccatttttcttgcggctgtgattctggccatcgttggctcgctgatcatgatcgtcgcccaagccttcccgctgctgattgtcgcccgcattattcagggcattggctcaggcgtggccacgccgttgatgatcaacatcatcctggagcagtctcctcgttcgaaaatcggccgattgatgggcgtaggatcgctggtcattaccgtggctccggccatcggcccgaccgtcggcggcgcggtgaccacagtgctgccgtggcgcgcgattttcgtcatcgccattccgctggtgctaatcgcagcatgcatcggcatgaagtgcattgagcagaagacaccgaccgaggctgcctatcttgacccgattcagcttgggtccattgttgtcgcgttggtcggtctggtgctggcgctcaaccaaggtggcgtggccatcagtgcggcggtgtccggcaagtcagccacacgctccggcattatcgccattgtcagtctgattgcgggcctcgccttgttgatcgtgttcgccatgagttccaagcgtgccttctccccgctgctgcgccttggcattctcaaggatcccgccgtactgttacacgcctgcgcatatctgctgctgccattggtcgccatcggctacggctatgtcatcaccaatgtggcacagctctcgctcggtaccacggcatttgtggccggctctctggtactgcccggagcactggtcggcgctgtctgtgccccgcttggcggctggttctacgataagttcggcgcggtcaagccgattctgattccgatcggcatcgctattttgggcccagtgcttatgctggtgttctcgatgcagcttacgcccttgctgctcgccggattctatttcattttcggtctgttctattccatcggcaatgcgaatgtgatgaccagtggcctgtcggaggtctctcccgagttcaagccggacggcaacgccattttcaacacgtgtcttcagtttggcggcgctgccggtaccgcactgttctccacgattctttccgtggctcaggccggcgcaggagaagaaggcaccgctgagtttgctcacgccactgccgtcggcggcacatggacgtttgccacgatgacggttatctgcctgattggctggtgctgtctggccaccgcgttccgcattcgcgcggcacgtaagcgtgcataaatccgatcatcaatagagtcccagctttccaaacacgtgtggggcgtgccccgggagaaccccggggcacgccccacacgctaatgaaaggaagaaaaggagaaagaaagctttggcgggcagtgccggctgctgtgaccttgccatcacagcagccgggctgatcccgcctattcagttatggtgtgtgtcgtattcggtgcggagaccgagcgggcaagcccgctattttttatctccgccgaccgccatcaccgcgcgctgaagcacaacgaagacgaggatcatgagaccgataacgatggtggtccattcggccggcacaccgaagtcagaggtgagcggatcgaggatggagcggaccagagagccgagcacggagccgagcacgtagccgaagccaccggtgatgatcgtaccgccgatgaccacggaggcaacggcgtcgagctcccagccaacacccacagtgttcttggcagagccgatgtttgcggtgtacacgatcgaggccagggcggcgagagtcgcagaggtcaagtagatgatgtactgcgtgcgcttgaccggcagacccatgagttccgcggaggaacgggagccgccgatggcgtagatggtgcgtccggtgcgggtatggtgcaggaagacgtagccgaagaccacaaccaccagtgcgatgatcacgccgacgttgaaggacagatcgttggagatcttcggattgtcgatgatcttgatcgcgttggagatgaacgagaagtcattgccctgcgggaaggtcagcgagtcggtggagatgatggaggcaagaccacgggccaggaacatcgtcgacagggtcgcgatgaacggctgcatgttgaattcctcgatcaaggtgccggccagcaggccgaacacagcgccgatgagcagcatgatgatcatgaccaggaaggcgggcacgccggcgttcgtcagcttcaggccgacgactgcggtgatggccacgatagcaccgacagacaaatcgataccaccggtcagaatcggcagggtcatggccacagccagaataatcaggtaggcgtggtcaatgaacagggaggagatgaagcccagtcgaatgtaggtgccgaacaacgcctgacccatgatgatcatcaggatgaagatcaccacggccgcgagggtcgggatcatctgacgatcgagcttgaagcccttcttgggagccttcactttgtttgccgtagctgttgtcatgctgccaccgccttagcttgagccttgagcgcgcgcttgcgtttcatattcgcgctcaggttgtgaatcttcggagcctgcatcacgcagatcacaatcacaacgacggcgaagaaggccggagttgcctcggcgttgacgcccagggtgatgatggtcttgcggatcatggcgataattacagcaccgacagcagagccggcgagggagaacttaccacccagcagtgaagtaccgccgatgacgactgccagaatggcgtacatttcgaggtcctgaccggtcttaaccacgtcgacacgcatcacggatgcggtggcgaacagaccagcgatggccgcgaggaagccggaaatcgcgtagacgaggaagaggatcttcttcggcttgataccggtcatacgggaggcttcctggttgatgcccacggcctcaatcatcatgcccatagcggtcttgcggcacagcaggccaacgagaatcacaatgataacggcgatgacgaagttggcgggaatgcccagaatgaagccgttggcgaaccacttcagaggttcgttgccagcaactgcggaggcgtcggtgttctcaccggaggtgatgaccttggccataccacggccggcgagcatcataatcagggtggtgatgaacggctgtaggcccaggaaggaaaccagagcgccgttgacgcagccaatggccagaccaacagccaaggcgatgaggatggagagccacacgttcatgccattggacagggtctgcatggcggcggcacctgccactgccataacggaaccgaccgaaaggtcgataccggcggtggagataaccaaggtcataccggttgcaatcatcaggtatcgggcagattcctggagcatggtgatcagcgggccggccagaccaccggtgttgctgttccagctcagagccaggaagtcatgctggaagatggtgcagatgatgaccagaagaatgaatgcgacgatcgaccaggtcaggttgctgctcagcagcttcttgacaaagttgttgccctcggcttttgccttttcagccatctcatgcctcctttccggtgtttacgttggtgttagcgatggtttcgacgatggtcgcctgagagacggtgtcgtcgttttcgatttctgcgatcttgtggcggtccttgagaacctcgatgtcgtcggacagacgcacgacctcttcaagctcggaggagatgaagacaacgcccatgccctgagaggccaggtcaagcacgacctgctgaatttcagccttggcaccgatatcgataccacgggtcggctcgtccagaatcagcagctcggggtgcgtggccagccaacggccaataagcaccttctgctggttgccgccggagagattcttgaccgggcgatccgggtcggcgggacgaacgttgagttccttcatgtacttgtcaacgatggcgtccgcttccttcttgggaatcggcttgaacataccgcgcgttgcctgcagggcgataaggatgttctggcggaccgtcaggtcgccgatgatgccctcatcacgacggttttcggtggaatacgcgatcttgttcttcaaagccgtgtacggatcggagatgttgaccttcttgccgttgagcgtgtaggtacccgaatccggcttgtcggcaccatacaggagtcgaccaagctcggtacgaccggagcccagcaggccagcgaagccaacgacctcacccttgtagatgtcaacatcaaccgggttgatggtgcccttcttgccgaggcccttgacatcgacgatcggcttctcgccgggggtgatttcacggcgagccttcttggcaccaatctgggacagctcggcggcggacttaccaatcatcatgccgatgagttcgtcgcgcggggtgtccttggtcatgacctccttgatgaactggccgttacgcagaatggtcagacgatcggtgatctcataaatctgatcgaggaagtgggagacgaagaggatggccacgcccgagtcacgcaccttgcgcatgatcgcgaacaggtccttgacctcgttggcatccagcgaagaggtcggctcatcgagaatcagcaccttggcgttgatgaccatagcgcgggcgatggcgaccagctgctgcatagcgatggagatggagctcagcggagtgtgcgggtcaatggattcgaggcccatctgtgccaaatacttcttggcggcctcgtgggtcttcttccagtcgatgccgaaggggccgcgcttttcgtggcccagcatcacgttctcaccgacggaaaggttggtgcacaggttcacttcctgatacacggtggcgataccggcgttttgtgcgtcgagggtgccgttgaactgctgaggcttgccgtccaccataatggagccggcgttgatcttgtacacaccggtcagagccttaatcatggtggacttgcctgcaccgttctcacccatcagggcgtgaacttcgcccgggtagagagtcaaatcaacaccatccaaggccttgacgcccgggaattcaatcgtaatgcctttcattacgacgatggggtttttatctgtcatgtctttgccttaaacgagaatgaagtgttatcgttttgtgatatttgagccacacatgagtgatggtgtggaaggaacatccttctcacaccatcacatcaattatttggttcagttatcaatgagtcgcagcagacttatcagtaggcgcgggtgttgttgtccagagcttccttggcggaggcggcgtcgaaggtcttggactcgatctcgatgtccttctcaacggtcttgccatccaggtagtccttgacggcctgagcggtttccttgccgaaaatcgggttgtactcgatcacgtaggagaggtcgccatcaacaagagcctgcagagcgttcttggtaccgtcgatggtgatgatcttgaccttgcccttgaggccggcggcgtcaacagcctgagcggcaccgaggcccatctcgtcgttctgagcgaagatgaactgcgggttgtcggacttgtacttgtcgagcagaccagcggtcacggtcttggcctcatcagtggaccagttagcggactgggactcaagaaccttgacgttggaggcaaccttgttgccccaaccagtgccacgatccttcaccacggacaggccggcagggccttcgaggatgaagccgttggcgccatccgggaagttcttgttcacgaactcggcagcctgctcgccgcaccagacgttggacggtccgatgtgagcaacgatggccttcttggcctcggcgtccttgacgtccacgttacggtcaacggtgaagaccggaatctcagcctcagcggccttcttcagggagtcatcccaaccggaatcctcggtggaggacaggatgatggcgtcgacttcgtcgttaacgaacttgttgaacgcctgaatctgcttctgctgatcgttgttctgggtcggagagtaggtcaggtcaaagccggcatcctcgaatgccttctgaatgtccttctcgttggcggtacggaagccgccctcaggaccgacagccacgaagccaaccgtcttcttgccggagtccgagctgccacctgcgttgctggaaccgcatgcggcaacgctgacaagcgcagcagcagaagcaacgagggcaatggccttcttccaattcttcataaatactcctcctcgagcagtgtttattttttggatgatctttcatcctgtttggtgactgttcgtcatcgacagcctctagtatgacgctcacaggccaaatgttcaatcgcatgcgataacagtttgataacaggtttataacaaattaataacagtggttcaaaaatggcgtcgcaacactgttttgccttgataacagaccaataaaagtgattggttgcgcagcggcaatgccgctcgccagccgagcgacaaagccgttgcctcatacaacaagaaaggttattatgaacaccgtttttcttataccatctactgcgcaccgagggcagtgacctggctatcggcgatggtccaggaaccgtcgagtgagccagaaacggagcgaacaatacccaaatcgtccacaatggccaggcgacgggacaggctaatctgccccgatgccatcgacgttatggttccattaggcagacgctgcgcattggccgggcctggtgccatttgacgccatgcctcttgttgttcgctgtttccctcaggaggtgtggtggcgtacaccagattcagatcgttgtagaacgtgagcatggtgacgtgtctgagcacactcacttgggtggccgctttgctcagaccgctcagtgttttatcaccgttgcgcgccacaccggtcatcatcacgccgttcgtgtcctcgccctcgactgccaacgccaatcggcacccttccggagaaaccgccaatgccacaatgctgtcggcagcgccaagccaatcaagcttcagatcggtttccttacccccatctgacacatgcaattcgcgcccgttctcggatacagcccatacttcgccatccagaccttcggtaatcgatcgcatcgactcgccggagaacatcaccccacaggacgcaccatcagatttcaggcattcgacgacaccgtccgcacgcaacaccgcaccgccggatgaggaaaaaacgaagccccgagcatcgtcatatccgggggcctcccctacacgcaacggactggagctggccagggaaacgatatgcccaccggtcaacgtgtatacgcccgctgtcggctgctcggtagtaagtttcacatttgcgtcggcatcagaatagtccactccgtcgccggtaatcttcagcgcgtattcggcattgccgtcgcccatagtcagacggatgcgatgtaccagcaggcctcgttcttcctcattcaacgcattgataccgctgttaaggtgtatctccaccacattgttcttcaccggcacgctgtcgaccgcgagtttgatggtaggcaagccggtgcctcgcagcactccttccaaccaggagggtgcatccgagagtacttcaccgactgcctgggtgcgccagttgcgccagctcagccatcgaacatccggtatgagctgtttgccggatgtgctcacctgatacacggatacttggcggaagacttgttcaaaatcggcggtggatatcaccacgccgttctccaacgaggagatgcgccactggccgcttcttttaatcaagatataaggaactttgctgatcgtgctgctatctgtcggcgtatacacgccatgcgagtccagagagccgaccacttggagctgtacttctacaatcagcgagctctccgccccttgcggggcactcatcgtattggcacggcggcggaaatccggcgtaccgctgtagaccagtgccgaggaatcgccattccatccggccgacgccgaaccggtcagaaactcacgggccacacggtagccatcggactgtacgccggcaggcatggcatcatagaaccctttgacgatggtttccggctgcgcatcgtccgcaggtccctgaggattggtgtaaacacgctgagtctgctgttccaccggtgccagagtctgcaccgagccgctaatcggcaaaccgaacggacttgagcatgccgtcatcgtgacgcaacagactatggccgcgcctgcggcggcaatcgttctggtcactcgtctcatagcggcctccccatcatcgtgtcgcggcgaacctcatgataatcatgtgtgacttggctggtggccacaccaaacccaccggtaatacgcaggtcatcgggcgtttcagaagcaaaattcaccggcagttcagcgtccgccacctcaccttggtcggggtcacgcggcagcaataccaagaaccaggtgccctcccccactgccgaacgtacacggatagtaccgtggtgcagcaaggcatcagtcatggcgatggccaagcccaatccggtgccgccggtaacgcgcgaacgtgaagggtcgcttctccagaatcgatcgaatacatgagcgactttgtcttcgtcgataccaacgccatagtcgcgaacgctgatggccacggctttgcggttggccgcgacacgcacttcgatcggccggtcctcagcgaaatcgacggcattggccaacagatttctgacgatgcgaatcactcgacgcgaatcgatacgagtcaaaacctgcacattgggcagatacgtgtgaatcggcacccgtttggcttgggcgatgccggcaacttggtccactgccgtttcaattggttcgcataaatcggtttccacaaggtcaagtgccgcataaccggcatcgtagcgggagatttccaacagatcggcgagcatgtcttggaatcgactgatctggccggccaacagttcgaccgtacgcttggtggaggggtcgaagccgtcttttttcatttcgagcaggtcggaagccatacgcatggtggtcaccggggtgcgcaattcatgactgacgtcggacacaaatcgtttctggaaaacgcttgcttcctccagctcatcaatcttctggttgagcgcatcagccatcgtattgaaggattgctgcagcacaccaagctcatccttacgattcacggtaacgcgcatatcgagattgccggaggccagtgtttccgaggccgctgccactcgttcaatcgggcgcacgatgccacgaatcaccagccagattactacgcccaccacgatggacagcaacgcacagatggccaccagactgagctgaatctgcgtcaaggactgttgctggagcgtgtacgaataaatggcgaagaattcgaggttgccggccacgccaaagtccaatacggtgccgagcaccgctgcgggcgtcccgctgcccgacatgccggaatcaccgggaatttcgaccggctgatagaacacgctgtcatccaagtcggaggccacggacgaacggatgtcatcagaaatcagactttgatagctgggttcggtggatacggggatgatggcacgcgagttggtatcacgactccacaaatacacacctatcaggttggagggcccctcggattgcaacgagaacgccaagtcattgaccagctgctggatctgcactgtggtggagacatcggccgcgtccagactggtttgggcctgctgcaccatgtttgaatagtcggcacgcgactgcgaagtgattcgggtaagcagcgaggcgcgcactgataccatcgatacgccagagaagacgatggccacggccagtgtaagaatcacggtgagggccacggtgcgggcctgcagcgagcgacgaacttcagcgcgtccgtggcgcagcaagcgtttgaggctgaatcgagggcgcaggttcattgttcaggagtgacgaacttgtagccgatgccacgtacggtctgcacgatttgcgggttctcggggtcgtcctccactttggccctaaggcgttgaacatgcacattgatcaggcgcgtatcgcctgaattctcgtatccccagacattcttgagcaggctggaacgactgatggcctcgccggcggcggccgcaagcatgaacagcagctcgaattccatcggagtaagattcaggtccttgccatccttggtggcggtgtgttccaaacggtcgatgacgatggatccgcgttccagatggttgacgtttgcattgccaccgcttgcgccaccggtggcaccgtcttcggcggccggcttggcgatgcggaagcgtgcatggatacgcgccagcaattcggccactttgaagggcttgggcacgtagtcgtcggccccggcttccaagccggccacgacgtcaagtgtgtctgatttggcggtgagcatgataatcggcacattagaggtagctctgatgcggcgggccacccccgtgccgtccagcccggggagcataacgtcaagcagaatcaaatcgggcttgacgatggggaacatttccacagccctcagcccgtccaggcaggtcacggtctggaatccctcgttttccaaaacaagactaagcatttcgccgatggcctgatcgtcgtccacgatgaagatggtcgccatggtgtttgtcttccctttcccactgttattgttgcgttacactttactcccctatgttcatttctgttcgggttccccgccatgcaacatcgggcgaatcttggcaagacgctggctgacttcgtgttcgtagccgcgatcgttgggatggtagtactcggtgccacgcagctcttcgggcatatattcctgtggcgccacggcaccgggccaatcgtgcgcatacttgtagccctcgtggttgccccactctttcataagcttggtgggggcgttcctcaaatacagcggaacagcgccgatcttgccggcatccacgtccgcgagcgcctggttaatggcgttatagctggcgtttgatttgggcgcggtggccacggcaatcgtagcttcggccaaaataatacgtgcctcgggcatgccgaccagcgccacggcctgcgccgcggccacggtgacctgcaaaatctgcggggcggccatgccgacttcctcgctggcggcgatcatgatgcgacgggcgatgaagcgcggatcttcacccgctttcagcatgcgtgccagataatggatggcggcatccggatcagagccccgcatggatttgatgaatgcggaaatcacgtcgtaatggtcatcgccgtctttgtcgtagcgcacggtggcggtgtccattaccgtagccacgatttcgggggtgatgatgggtcggcgtgcgccctttttgcgggcttcgtcgccagtgaccgcgccagccgcggcctccagaatcgtgagactcttgcgtgcgtcaccaccggccatgcgcacgatgtcggcgatggcttcgtccgtggctttgacctcgcccctgagaccgcggtcatcagtcagcgcgcgctgcaccagttcgatgagctgatcaggctccaatgactcaagcttgacgaccaccgaacgggagagcaacggtttgatgatggaaaagctcgggttctcggtggtggcgccgataaaggtcacgtcgcggttttcgacggcgggaagcagcgcatcctgctgggatttggagaagcgatgtacctcgtcgatgaacagtacggtttcctggccgcgtgacacgagccgttcgtgagcgcgggtgagtacgtcgcgcacgtctttgacgccggatgtcacggcggagagttcctcaaacacgcggccggattggccggccacgatggtggcgagcgtggttttgccgacgcctggagggccgaacaggattacggagctcggcgcggtgagactgcctttgctggccggattggcgaggcggcgcagcggcgagccctggcccaacacctgcgtttggccaatcacctcgtccaaagtgcgtggacgcatgcgcaccgccaacggccgcgtcatcgactccggcgcatcagccgccccaaacaaatcgttctcactcataacgtcctatagtaccccagtgttcgaacagacgttcgagctgcaccctggcttccctcagagaggggagccaagaaaggaatcagttactcaccttgtagtcgtggaagactacttcgccggtgtcttgggtggcgtcgaggtccacgatgccttcgatggcccaatcgtgatcgccatcggaatcatcgataatctgacgcaccttccacgtatgctcgtcgttctcgtgcttgtcatccaacatgaacagttcgggcgagcgcgcttcggcgccgatgcccacgtactcgtgctcgtcgtagtagtcgtcgagcacatcttcccattcgtgcacaccgtagccccagtctttgtcgagcgcgccgagcttgtccggctggtcgaggtccataagctgcacacggcggaacatggcgtttctgatcagcacgataaggcctcgtcggtcctcgaccaccgcgttcttcttgcccggcgccgccaaggaggccgccgcctcggactggtcggcggaatcgccggcgttctcccattcatccaccagcgaggagtcgatggagcgcacgagcacgcgcagccaggagatgatgtcttcgagttgctcgtcacgcttttcgggcggcacggtacgcgccagcgtgcggtaggcgtccgagaggtagcgcaacagggtaccttcggagcgggcgatgttgtatcgggtgatgtatccggtgaagtcggaggcggtttccaccatgtcgcgcaccacggatttcggcgatagccagtagtcgttggcccacggcacatcgtggcggtactggtcgaacgcggattcgagcatgtcttccagcggcttcggatacgtaatctcctgcagcttatccatacgctcgtcatagtcgagtccgtcagccttcatatcggccatcgccttgtctcgggcctgacgctcctgggcacgcagcacctgcttggggtcttcgagcgtggcctcggccatggaaatcacgtccagcgcataggtgtcggactcggggtccagcagttcgagcgcggccagcaggaacggggagagcggctggtcgagggcgaagtcgtccggcatatcaagggtcatgtagtagtccttgccgccgtccttgcggtcctcggtttcgatgacttcggtatcgaacagggtttggaaaatctcgtcggcccgctggtgcagatgctccttttggtcgggggtctgcgcggaatcgtcgatgagatcgtcgatacgggcacgggcgtcgccgccctgcgccacttcgttgagcaccatcgaatgcgtgattttcaggtgcgggaccagggtttccggttcggcgtcgatgagcttgtcaaacgtgctctggttccaggtcacaaaaccttccggagccttcttgcgcttgaccttcttgagcttcttcgggtctcccccggccttggcgatggccttctggttttcgatttcgtattcgggagcctcggcgatcaccagtccctcggtatcgaatcccatacgaccggctcgtccggcaatctggtggaattcacgggcgcgcaggcggcgcatcttggtgccgtcgaacttggtcagggccgtgagcaccacggagtgaatcggcacattgatgccgacgcccaatgtatcggtgccgcaaatcacgggcagcagaccctgctgggcgagctgctcgaccaggcggcggtagcgtggcagcatgccggcatgatggatgccgacaccggtgcgcagcagtcgctgcagaatcttgccgaaggctgtggtgaatttgacgcctttgatggcttctgcgatggcttggcgctgttccttgctggacacgccggtggaggcgagcgcctgcgcggtctccagcgcggcgtcctgcgagaaatggaccacataaatcggggtttcgccgttgcggaaagcgagttccacggttttttccatcggatcgagcgtgtattggtagcttaacggcaccggtcgcggcgcgtcggcgattacatccacgtccggggtgtcgttcagatcggagagcttgtcggcaatggcgtccacattgccgagcgtggcgctcatcagcaggaactgggtctgcggcagcgtgagcagtggcacctgccacgcccaaccgcgctccggatcaccgtaataatggaattcgtccatcgccacaaggcccacgtcggcatgggtgccttcgcgcaaagcctgattggcgaggatttcggcggtgcagcagatgatcggcgcgtccgcgttgatgtggctgtcgccggtgatcatgccgacgttgtcgcggccgaacacttcgaccaagtcgaagaatttctccgacaccagcgccttgatcggagcggtgtaataggagcggcggccagtgcacagggcggcgaagtgcatgccaagcgccaccagcgatttgcccgaaccggtcggggtattcaaaatcacatggtcgccggccaagaggtccataatggcctcttcctgatgcggccatggttcgatgcctttgacgtcttccacccagccgaagaatcgttcgtagatgtcatcggccgtaagattccgttcacgctcgtcaccgtcccattcgggggccagccgccccagggatccgtattccttctcgtcagtcataatgctcagtctacccagtggcctattccggcggcacgagccaccctccgtcgctatgcgatgcctcccgccagcgggcggagccatgcgaagagccgtgccatgcgcttggctccgccagtgggaggatcgctcacgccaaccggcggcgcacctcgtcggggtccacctcgggttcgaggggcggccaggtcatgttcatgttcttcaaggtggtgcgcagcagttcggagaccactgctcgcgaataccagcggttatcggccggtacgaggtaccaaggtgcggcggccgtgctggttttctcgaacacctcctgccatgcggccatatactcatcccagcggtcgcgggcctcgagatcggagatgtcgaatttccagaacttggtgggatcgtccagtctcccgaggaagtgttttttctgttcttcctggcttaccacgaggaagatcttgaggatggcgcatccgctggcggccagttcacgttcgaaatcgttgatctggtcgtagcgggcacgccatacgtcttcgggataggtgccatagacgtgcggcatgaccacatcttcataatgggaacggtcgaatacggcaatccaccccggcttgggcaattcacgcttcacgcgccagaggaagtcgtggtcgagctcctcggccgcaggcttgccgaagccatggtaatggatgcccatcgggtcaccttggctgaacacgtgacgcacgatgccgcccttgccggaggcatccatgccttgcagcacgatgagcagccgccgtgtcgagcctttgacgccattcgcgtacatgagccgctggtatcgggcgatttcggaggagctgatcgaaatgaactcctcggcgtcctctttattgccgtcgaatccgggagtggaatcgccttcgacatcagtgacctgcatgccgtggtggaacataagacgttgagcgggcggcaacgaccatacggcgctgagcagttcactggatttcgccgcacgtgccagtcgttcaggcacgctggcactggagtcgatggtgtctatgcgatccgccgcgagctgtaataccttgtcgatccgtcgatcggttttgtattcctttcccttgccgttcttgttgttctttcctgaggattttccggctgtaccccacttgccggcctcttcaggcttgttggttctgtcgtcgtccttggccatgctcccgattgtacgtcttgtaactcaggagacccagcaacgtagcgacattcacattccacttgttactgcaaatctataggcatgcagtcgttcggaccgtaattgttggctttgcaccaattcctggcaccgtcggcaatgtcgaagtaggtgcagttcttgagctcgacccaatcgcaacgcttgctatccgggtctccggcagctttcgtattgccggcatagacctcgttgatgattacggatggtttggcagccgtgttctgttcggcagtggcctgctgctcgtccgcagccgcagcgggcacgccgatcagggcgatgctgctcagtgtcaccgcagcggtgagcagcgcgatggcgcgccgcgacatcgcggtgaaattgttggtgtggaacattactcccgttccttcctcgggttgtgccgccgcagcatgatgctcttcggcggatgacaccccgagggtatgagagagaaatgaagccgacaccgtatgaaggcaaactcggcagatctccaaactgaactttggctgaattactgctgaagctggttcttggatttgcgtcgaaccgtccgtattccgccgataatcgcgattacagcggtaccgatagctacgctgatcaacgacggtcgttgcacggcatggagagtggcgagatccggcccggccgcaatggcactgttttcacccgccaagctatccgacgccgggtgattgcccgcgtcgatgtactgggcattgaccacactcgggccggcaagcgccacttggtcagcggtctcgaccttggccacatcgccgtgcttatccaaggtgacgcgggcgcacagggctttggcccagttgatacgctgccagccgtcgctcgattgccatagggggtatccggaatccaaggcggtggctttcaaaatcgcgttgcgctgatcggcgtgcagttcgggataggccagtcgcagcacgtccgccgccccgcgcggggccacgaaatcagcgccggactgggcggtgtcttgcgggaaggtgtaggtcaggcgtgcggtgtagacgcgcacggccgaggcttggtccgcgaccggctcggtggccactgggtccagaaaatcgttggtgtagccgcccgaaccggaggccttggtgttggcgatgcaggcggcgagggtagtgccgtggccgtccgcggcgcagcgggacaccagatagtcgcgcagctgccgggacgcgggcacgatggacgaagcgaattcgttatgccagtactgcccgttctgggcggatgcgccaatgcgcccgcccatgatgtcaagcggataatgcacgccgagcacgatgcggttgttgccggcctccgaagtgcgggccatgatttgcggcgcaagttcgggaatcatgccggccagcgcgataccccacgaataggcgccggtagtgtggccggaggggtaggaactgtttttctgcaagttcgagtagccgggcacgtgttcgagccatgagggcgattgcttgatgtcaagcgtggcgggcagtccggcgagatcgttagtgccgccgtagctgctttccgcacggttcagataggggcgcggatgcatggccgcacgttttgaggcgtaggtggaggccacgttaaaggagaagatatcggcgacggcgttgagtttcccggatttgagcccttcgctcatatatttgccaagcaccggaccgagcgcgtccggcatggtttcctcggcttgcagatcggagtcgacgagtgcacgcttgcgttgggcgttcaggccatccttatcgagattttcggcggctttgtggttaatggccacggccaaatcttcgtcgagtttcatggtatcggcgtggagcaccttgccaccgtgtccggcatcggtgggggcctgccaatagttcttttcgtagtcgtagagcaatgccacccaatccgggttgggcagctggtcggtctgtgcgattgcaggcatcgcggctagcgtggccgccaacgccagcggcgcaatggtcgcaatagcaaaaacggaggataggtgccggaacatcttcatatgttccaacctatcctccgtgaaggctacgtagccggagcccagtcaaacactcagtaaattcttcgtgctggcttagcggcgattgagctgaccgtcaggcctctggcttgtcttcgggcttgcggaacgccgggaattcgccggtctccgggtcaacctgtgactcgggctgggtggcgtcatatccctgttcgtagcgggtgcgccgccagttgcgaatcgaggcgttggtgccacggtgatgcacatggtatttgcgcggcgtaccgcccagcggcagctcttcgacctccttggccacagcaatctggttgacattggacgggtcgccggcggcgatcggcgccagcggctcgggttcggcgggtgcggccgtacgctgctgcatgcgcgagggcagccattcggcgagcctcgacaacagccagcaggcgatgaagtaaatcaccgcggccatgaccagcgtctgcaggatgttgaagtacatcgagccgagtcggcgcgattcctgcagcaggtcggtatacatgatgatcgagcctagggcggtatccttcaacaccacgaccagctgggtgacggcggccggcagcatggcgtagacggcctgcggcacctcgatctccatcagcgactgcgtttcggtcaggcccaaagcgagcgaggcctcacgctggccgcccggcagattgccgacgccggagcgcaccagttcggcgaccaccgaaccgttgtacagcaccaaggccagcaccacggcccaataggacgggctgggcaggcccgcgaacgcgaaccatcgccagaagaagatcatgagcagcagcacgggaaccgcacggcagaactcgacgatcacggcggagacgccacgtaccaacgggttcggcagcagtcggcccacgccgaacaccaagccgaacaccacggcacccaccacggccacgatggtggccttgatggtcatccacagtccgggcaggtagaaatcggtccacgcttcacgttcgacggcgggcttccacagctcccagctgagctgattctcgccgtccggcgggttgtgcaggcgcatgaggataagcacgagcaccatcgcgaacagaatgcccgcgatccagttgacgatgcgaatggtgcgccggcccttgggaccgggcgcgtcgaacagcacggaattcgaagtatcggccatatccgtcacctccttacggcgagcttgttggacaggtacgtggtgagcatgccgatggggatgatcaggatcacgtagccgagcgcgaagatcaggaagatctggatgatcacgtcggggcggaattcgatcatctcgctcatcagcgaggatgtttcggtggccacggatgcggcggcggccacggtggagttcttgagcagggcgatcagcgtgttgccgagcggtgccacggagcctcggaaggcctgcggcagaatgatctcggtggcggactgcatgaagcccaagcccagcgctcgtgcggcctcggcctggccaatcggcacggtgttgatgcccgaacgcagagattcgcacacgaacgccgccgtgtacaggctcaggccggtgaccgcgagccagaagaagttcgtggcgaaggtgtcggagaagctgagcttcagctgcgcgtaggcacccagcaccatgaacaccatgatgatggtcagcggcaggttcttgaacagttccacatacgcaccggccacggccctgagcgaggaaatcggcgagatgcgcatcaccacaaggatcacgccgaggatcagggagaacagggcggaccacaaggtcagttcgatattgaccagaaacgcgccgagcacgtcatactggctgaagagttccaggaatccgctcatcaggcctcctctccttcgtccggggtgggcgggttgtagcgtacgtcgggcgtgtagttggtgcccttggtgttatcgctgatggcgttctcccacgagccgtcctgaatcatgtccacgatggcgttgttgattttggtggccagctgcgtgtcgcccttcttgatgcccacgccgtagtattcctgcgtgaacggtttgccgaccaccttgagcttgccgcgcgaggcggaggccaggccggccaggatgatgtcgtcggtggttaccgcgtccacgatgccggagaacagggcggtggcgcattcggcgtaaccgggctgttccataagctggacttcggaggcgaacttctccttgacggtggcggcggaggtcgaaccggtgacggagcataggcgcttgccgttcaggtcttcggggccgttgatggagttgtcgtccttgcgcacgagcagatcctgtccggccacgaagtacgggccggcgaaggagacggccttcttacgctcgtcggtgatggagtaggtggcgaggatcatgtccacgtcgccgttctgaatcatggcctcacgctgcttggagggagcttccttccagatgatctggtcttcggaatagccgagtttcttggcgatgtacttggccacgtccacgtcgaagcccacgtaggtgccggacttcttgaagcccaggccgggctggtcgaatttgatgccgatgcggatcttgccggtttcgtccgcgccgcaggcggccagcgacattgtgcaggccacggcggcgagcgcggcgatcacgcggcaaaccttccgtttgaacgtattggtgaatgtcattggattgcgtacccgtctttcagtgggttcgtcagtgggtgaggatcttcgagaggaagtccttggcacggtcggtctgcggatgctcgaagaactcgtcgggcgtgttctcttcgagaatctggccgtccgccatgaagacgatgcggtcggcggccttgcgcgcgaagcccatctcgtgggtcacgcagatcatcgtcatgccttcatgcgcgagttcgaccatcacgtcgagcacttcgttgaccatttccgggtcgagtgcggaggtgggctcgtcgaacagcatgaccttggggcgcatggcgagcgcgcgggcgatggccacacgctgctgctggccaccggagagctgggagggcatcttgctggcctgggagtcgacgcccacgcgggcgagcaggtccatggccagttgctcggcttccttcttgtccatgtgacgcaccttgatgagggccagcgtcacgttttcaagaatggttttgttggcgaacaggttgaacgactggaacaccatgccaacttcggccctgaggttcgcgagctccttgccttcctgcggcaggggcttgccgtcgatgcggatgtcgccggaatcgatggtctcgaggcgattgatggtgcggcacatcgtggacttgcctgagccggacgggcccacgaccaccagcacctcacccttggtgacggtcaggttgatgtccttcaggacgtgcaaagcaccgaagtgcttttcgacgtgggtcagttcgactagcggacggttcaggtcctctttgccgggaaccagcggggtcaatttggccttgcttggtgatgttgtgcttgtcgtgcgcgaacgcactgctgtttcattgttcgtttcagacatgagtgggaggataacacaccgacgtttccaatgtgtacacagtatgtccacacagttgctcagtcgatgtctcatctccgcatcagacatcgtgaaggcggcattgggcatcggcatacattctcgctgagtcgcgcatcgctcggcgtctgctgtgcgctgattgcctgctgcgtggtggctgagacgttgctgcgacggcaaagcgggcacgtgttgtcctatctgctgattccatgtttggccttggtgtcgttggcgttgctgccgcgtatgccgcagtcgggcgcatggctggcggtcactttgtattgtgtggggctggtctcgccgtttcccatgtcgtattcgtataaatgtgctaggcattttgagcgtggctagctgttcgcacacgatgagtgctgttatacggtggacgacactcccgaagcgcggtggataaccgggcgcggcacacgatatgccggtggataaccggttcgcgccgcttaagttatccccattttccagttttgcccctatgccaccgtggaatgcgctacgctcggcgcatgaacggatacagcgaagtgccgcacaatggcgaaatcaacaactatctgcgcaaagatcttgacgccaaagccacggccaagaacacggcctgttggaatctgctgggcaaagtgcgcacgaaacgcacgttgtgtttctcgctgtataccgcattggaattatgcggcgtggagttgccgagacacagcacgttgccacagaaggacttttatgtgacggtgaggagcaaagggacccgctcttcattggacaatgtcgactatcgcatatggaatgcaaagttcagcagtatcgctttttcaaacggcgtaacctgcatgcatcccatggatgcgtggatacagtttgcccaatatctcaacctcaccgaattagtggtgctggctgaagcgctcatcagacgttatggatatgccattgaacaattcactcaacgactaacggcctttcaccgcgttattggccgtgcgcgttgtgaggcggcgctgaagctcgtaaaaccatcggattccgttcaggaaactcgtacacgcttggcgcttatgcttttcggcctgcccataccgcaaacacaatacggcattaccgattcagagaacggatacacctataccgttgacatggcttatccacaatacaaagtcgctattgaatatgatggcgatcatcaccgtcgcttccgcaaacaatatgtgcgggaccagcaaaaacgtcgacgtctgcggcaattgggctggaccgtcatcgaggtgttcgccgatgacctgtggaacaccgccaaacaacgtgccttcgcacaagaggttgccaccgcgatgcaaataccgcttcctggccgtcctcaaccttcatgccgggtattaatagacggcagccttaccatcaatgcgcgcaaaggggaatacaggaggcggaaacaagcaaaacacaacaaagcctcacaacattgatcaaatacggagttgcgattgctcctcatggggcggcaattcccccggcggcaatttgctcatggggcggtttgaagaaattgtgaaaccgcggaattaagccattttgacctaccgccccatggggttttcaccgccccatgggttgtttaccgccccatgaagaagttactgccccatgaggggataatcggcaaacgccaagggggacaccgcatggtgcgaggtttgccgcatggcggaggtgccatcgggcggagtatttggcaccccttggcaggtatttggcacattgggccccacccgcaaaaagcaaatggcccttggaattattccaagggccatttgcggctactagcaccggagcattactcctcgaaaatgaatctacgcatgcggagaccgccgttcgaagccgaaggcgcactaaggtgcgtcgagtgctgaggaaaggcggtatacgctccgtagattagttttcgtcggcgtccgggtcgtagtcgacgccagtctcggcgcgctgctcgtcggaaatcggggccggagcaccggtcagcgggtcgcggccgccgccggccttcgggaaggcgatgacgtcgcggatggagtcggcaccggccaggatggacacggtgcggtcccaaccgagggccaaacccgcgtgaggcggagcgccgtacttgaatgcctcaagcaggaagccgaacttctcgtcggcctcttccttggtgatgcccagcacatcgagcacacgggcttggatgtcgtcacgatggatacgaacggaaccgccgcccatctcctcgccgttgcagacgatgtcgtaggagtcggacatggcgtgctcgggatccttgtcgaacttgtcgatccaatccttggagggcatggtgaacgggtggtgcatggaggtccacttggagtggccgacagccacatcgtcatcatccggatcgtcggtgggcttgaacagcgggaagtccacgacccaagtgaaagcgaacttcttcggatccagcaggccttcgcgggaggcgagctccacacgcacggcacccagcagcagctgggcggactcgcgagaaccggcggcgaagaagacggcgtcgccttcctcggcaccgacggcctcgcgcaggccgttgcgctcctcatcggacaggttcttggcgacggggcccttgagctcgccgttctcgccgaagaccacgtaggcaaggcccttggctccacgctgacgtgcccaatcctgccaagcgtcgaactgacgacgcggcgtggcggcaccgcccttgaagaccacggcacccacgtacggggcctggaacacgcggaacggcgtgttcttgaagtattcggtcagctccaccagcgggttgccgaagcgcaggtccggcttgtcggagccgtacttgtccatcgcatccttccaggtgatgcgcggcagcggcagctggacttcatagccggcggacttccagatggcggcgatgaccttctcggtcatggccatcacatcttcctggtccacataggccatttccatatcgagctgggtgaactcgggctgacggtcggcgcggaagtcctcgtcacggtagcagcgggcaagctggtagtagcgctcgacgccggagaccatgagcagctgcttgagcaactgcggggactgcggcagggcgtaccaggaaccgggcaccagacgggccggcaccacgaagtcgcgggcgccttccggggtggacttaatgaaggtcggggtctcgacctcggtgaagtccatgtcttccagcgcgtggcgggcggccttagccatgtcggaacgcagcttcagattgtactgcatggacgggcggcgcaggtcgaggtaacggtacttcagacgcacgtcctcgccaggcagcttgttctcggactcattctcaagagcggtggaaacctggaacggcagggcgtcggacttggcgaggatttcgatggtctcggccacaacctcgatcttgccggtggccagatgggtgttctcgttgccatccgggcgcaggcgcacttcgccggtaatctgaatcacgaattcgctgcgcagcgggcgggccatatcctcgtcgtaaatgacgacctgcacgaggccggtcgaatcacgaaggtcgatgaaggccacgccaccgtgatcacggcgtcggtcaacccaaccggcgagggtgaccttctggccgaccagggcctcggtcacttcagtggcatgatgtgttctgtaagccgtctggctcattgtcttgtttctcctcgatttttcgcgcgaatacgtcagatttcgacggtttgctgggcaaccacagtatccggctcccacgacgtgcaatcggcggcaacctgctcgcccgtgacgatgttcttgacctcgtcgccagcgggctctgcgccttccgcaccttcggcagcggtggccgggaaccacacgtacggaatgccgagtttgtccgcgtacttgatctgcttgccgagcttggccgcggtgggtgccacgtcagtagcgatgccgcgcgcacgcagttggttcgcaatacgattggcggccgggcggtcctcttcattccacacagcgaccagcacggcggccgggctgacacggttggcgtgagcgccggcggtgtgcagcatgtagctgaccagtcggctcaggccgatggacaggcccacacccgggtacttgcggttgccctgggaagcgagattgtcgtaacggccaccggagcagatggagccgagtgatgcggcaccgtcgaggaaggtctcgtagacggaaccggtgtagtagtcgagaccgcgggcgatcttcaggtcggcgatgacggaaccggggcggatggcggcggcttcgtcgacgatcatggccagggtatcgagtccctgacgagccagcgtgtatgcctcggaatccttggcgatgccgtgagactcgcacagcgcatcgaacttggcggcaagctcggcaccgtcggaggcagtaagctcggccaattcgaggcaggcgcgtgcctgtgcctcggtggcgccacaggtctcggtgagcagtcgggccacctcatcggcaccgattttgtcgagcttgtcgatctcgcgcagcacgccctcgacatccgtcagaccaaggccgcggtagaagccttcagacagcttgcggttattggcgtgcacggtggccttggggaggccatacgcgcgcagctcttccagcgcggagaccatgaccagcggcagttccacttcatagtggtcgggcaggtcgccggcgccgatcacgtcgatatcggcctgcacgaactcgcggaagcggccttcctgcggacgctcgccacgccacaccttctgaatctgccagcgcttgaacgggaacgccaacgcgcccgagtgctcgaccacataccggctcagcggcacggtcagatcgaaatgcaggcccaaacgctcttcaatcggagtgtcggattcatgaccgacctcctgcaaacggctcagcaggtaaatctccttgctggtctcgccttttttcagcaaagaagcgccggtttccaccgctcgcgtctcaatgccgatgaagccgttgagctcaaaaaccttacgaagcgtatcgataacacgctgctccacaacacgttcggaggggagccactccgggaatcctgatattgatgcacctttagccacgaaatcaatataataggtgagggttgcgtcaaaacttcctggttcgcccgggatgggagacgctcccgcttatgcattctacgctttaaggagctggccatggccgacgaaactgtcaccgaacccgtaaacaccgctgcgcccgaagagcaggcaacgacacccgcacccgaggccagcgcggccacgccggcgccgactccgtcccccgcttccatgccgaaaccgcacgcgccctcccccgccgccttcgccaagaagactccggcggccaagccgcgcgctgccgccccggccgccgccaccgccgcctattccgaggctgatgtcaagaccgccgaggccttcggccgcgtggatgacaacggcaccgtcttcgtcaaggatggcgacgccgagcgcgaggtaggccagttcccggatgtctccaaggaagaggcgttggcactgtacgcccgtcgtttcctggatctcaaggccaagctcgatctgctggccacccgcctggcttccccgaacatcaaggcccgtgaaatcgacgaatccgtgaagctcttgggtgaagaaacctccgagccagccgtcgtgggcgatcttgccgcactcaaggcccagtacgaggagctgaaggctgccggcgaggccaagaagaccgaaatcgccgaggcacgcaaggccgcccaggccaaggccgttgccgagcgcaccgccattgtcgagaaggctgaagcactggccgcttctctgggcgacaacaccaactggcgctccaccgccgacaagttccgtaacctgttcgacgagtggcagaaccaccagcgcaccaccgtgcgcatcgacaagccggaggccgaggcgctgtggaagcgcttctccgccgcccgtaccaccttcaaccaggctcgccgcaagtgggctcaggctcgcgacaacgagcgcacggccgccaaggaagccaaggaagcgattatcgccgaggccaatgagctcaaggattccaccgcttggggtgagacttcccgcaagttcaacgatctgatggaccggtggaagaaggccggccgcgctggccgtaacgaggacgacgagctgtgggccaagttccgcgaagccgccgacaccttcttcaatgctcgtcaggccgatcgcgatcagatcaactcctccgagaaggagaatctggctgccaaggaggctctgctggtcaaggccgaggctctggtgccggtgaagaccgacgccgaggccaagaaggcccgccaggagctggccaagattcaggaagagtgggatcagatcggttacgtgccgcgtgacgatatgcgccgcatcgagaaccgtctcgacgccgttgacaagcagatcaaggccatcgaggatgccgcttggaagcagaccgatccggaggccgacgcccgcaagtccagcttcgaggagcagctcaacgcccagctcgccgagctcgacgccaagatcgcggccgaatccgacccgaagaagaaggccaagctcgaagccgagaaggccaccaaggagcagtggctgaacgccatcaagtaagggtctcgccagctgcccctctcagagaggggagctggcagtaaggctgactgaggggagtttacggttataccgcaagctcccctcagtcgtctacggcgacagctcccctcagcgaggggagcttcgtcatatttatgccgttttctcctgccctatactcataacttcaccccatagttcctcagtcacccagcaattggtgtcttacgcctgagtccctaccggtactgcagcaactgccgtgagcccttgatgtgcggccagatattcatgcaacggctggctgtatggcatattcagctcgccgtaattggttccggcacggaaggcggggtaactgtcgccgccctgaagcagatatgaattggacgcgataatcaccaggtcatcgtccgcaatcggtcggccgtcaacggcgaggttcacgatacgaaccgccgcatgttcgtcggcagcacactcgtcagcgtcagcgttggtatcagcgccggcatcggcattgccgctctcaccagccgtaccgcattcggcataccgatacgtcacgttcgaggagatgccgagccagcgccgctccagtcgcccatcgtcacggtggaattgctcggcgagcactctcttcacatcgcgcccggtgagcgtctcatgcgcggccttgaactgcaaggccatgagactatccacctcgcgcacggtgactttgccatcgccattcatatcaagccgtggagtccgcagactgccattattcgaaaatccgattaccggcaagcgattcccggcatacatatgcttcatgattgactctcggttcgcgtccgccaccagcacaccgaccgtattcccgtgcttgtccgaaccttgtttgtcgaaattcacgccggaggccaaggtgtcaatcaccgcgctgccggtatggttcgcatatgttgccgccgcctggtaaatatgctgcgcgcgcgatacctcatcgttctcctcagcaccggcagacatccaagcggcttgcgccggatgcgcattaagcccatccacgcccagcacgccgtcaaccgccgtatggctggtgccattgccgaggtcaacgtcggccactcgcaccgtggcgcgacgcccggcaccggtgatgatcaaatcctgcacggccatgttccgcccgaagctgcccgcctcgtaaataggcgcgccacccgcggtcgtaccgtgcttgatcgcgtgactgtgaccggtgtataccacatcaacctctcgcccaatatcgacgacggctgaggcatcggcatgcagcaaggccaccaccgcagccacctttccggagcgcttgagttcacgggccacacgattgattgcgtccaccgcccgttcgtcaaggtcggcatcacgcgtaatctgcggagtggttaccgagccgagcgcatcagtaagggcgcccacgaaacctattcgcttgccgttcaccgttcgaatcgtagagtcacgtacgtggctcagcagtccgtcagacgacttattggcggcagacgtgttggcgcacagccagtcgatgccgttgctgggatcagcgatgcgattgttgaaatcggcgacaccgcggtcgaactcatggttgcctaccgccgaaatcgtcaatccccacgctttggccatatccagcgtgggttggtccttctccaccgccgactcatgcggggagcctcccaccaaatcgccggtcgataccggaatcatattgccgggattatggctgtcggccacagtgaaggcggtggcgttgtccgcaccacgttcgatatgcccgtgaaaatcagtgatgtcggcgatggtcaccgtacgagtgccggaagatggattatcaccggaaaaaggaacggctcccgtggttccagcacaagcataaggaaccaccagagccgtaaggataagcgctactgcaccaaaaacgatccacgatcgcttgccggtccaccgccggttcttcatattcctgctcacaccagtcacgctagaatcgtcgattgaacggccatgcctagaaaggcgactctcaggtgaattcttagcggcgtcttgggatgggaaaggcctgaccccgtactatcagggtcaggcctttgcaacccgagtcactacgaatgcgtcagcaaggggagattactcgccaaattcctcggcgcagatctcagctaccgcatccacgcacgcctcggcaatcagacggccgcgttcggcgcttgagccggccggattggcgagtccgccgtgagcgggaacgtcaccttggcgcacagggtagcggacataggatttcgccgtggcaccggcttcctcgaccatacggtccatgtgcaccagttccggcgcatagtggagcatcaacgaagtttcggtgacggccgcatgctccaatgcccagccggggaacaccaatccatcgaacaccttgtcgataaccgactgcggaactggatcccaccaattggtttccacgatggtggccactcccccggtttcgcgggtgaccaggtcgatggcctcgacgatgaacgcctcgttttcaaaatgcgcgttcatgacgacgatcttggtgaagccatcggcgatgagttcgctcagcacgtcgtgcatttggttgatcactgtcacgccgttcatgtcgatagtgcccgggaacagcggcccgccaccggagagcggcttggacttgtatccgtagctcagggtgggcagcacggtgccgtcgatgcgttccgccagatcttcggcgacccgcgtggcgagtaccgcgtcggtgccgatgggcagatgctggccgtgctgttcggtcgaaccgatcggcacgatgacgggacgagtcttcgcctccttgaattccggccaggtcatgtggtccatacggcggttgctacccattgcagtactcctttaggttggtggtggattggatggtcgatgaatacgcccggctccctcggggaaggagccggagctgaggagatcagatgtgattcagatccttgtcggtgttttcgtgggaaaggatcatcgcgaccaaggcgatggccgcaacgcccaccatgtaccaggccggggcgatggacgaaccggtcagggcaatcaggacagtggcgatgaacgaggccgtaccaccgaagatggcgttggccagattgaagctgaacgcgaatccggtgaagcgcacggaggtggggaacgtctcggtcaggtagctggacagggtaccgtcgttggcggtcagggtggcgcacattgccagctcaaccagcagcacgggccagaactgggaggtgttgaggatgaggaaggcaggaacggtgagaacgatgaacgccacgcaagcgccgatgagcaccttcttgcggccgaatttgtcggagatgtggcccatgccgaacaccatgaacacgtaggcgaccaggcagatggtggtgatggtgccggactggggggcgtccatgccgacggtgtcagacagataggtcggcaggtaggtgagcacggtgtagaagccgaccgcgttcagcacgcaggctccgaagctgatgatcagagccttgagatggttgtggaacaactcggcgagcggggcgaacatgccgctcttggcagcgatttgaccgtcggcggaggcggcgcccttggactcaagcgcatcgttcatcgactggtagacgggggaatcagcgagcttggcgcggatgtacagcacaatcagaccgagcgggccggccagcaggaacggcacacgccatccccaaccgaccatcgcgctagagttcatgttggtggccatcagcgtggccagagtagacccggcgagcagaccgatagcggtggaagccggaatcagcgagcagtagatgccgcgctttgaagtgggcgcatattcgccgaggaacgtggccgcaccggcatattcaccggaggcggagaagccctgcaccatgcgcagcagtagaagcagaatcggcgcgccaacgccaatcaccgagtaagacggcaggcagccgatcaggaagctcgcaccggacatgaacataatcgagtgggccagtgcggctttacggcctttcttatctccatagctaccccagaacagtgcgccgattgggcgaaggatgaaggatagcgcgaacacgccgaaggtctgcagcatggcgacggtgtgattgtcggttgggaagaacaccagggcgatagtggtggcgaagtacgaataggaggcgtagtcgaaccactcgatgaagttgccgaggaaggaagataccgcgacttttctgaccatggcctgttcttcagtttgcggggtggaatttatcagtcgtgcagatgtagtaatcgttgcagaactcatgatgtcaccgtcctttcaaggatgtgctgttcgtgtgactgaatgagattcaagtgggaatccgtttcgcagcaggtcgaccagcgccgcgatagcctcgactatgcccttgagtatttgctgaaacgtgaatcgtcgattaacccgttcggcgtagaagtggacaggttgcccagtggtgccggcgcattattcaacatgctgttcttgccatgatttcgtgagtttggcggcgaatagcagcatcgaccagttcggtttgtcgttatagtcgacgccgaccatttgtgtcactttgtccagtcggttgtacagggtttgccgtctgatgcccaattgctcgcacgcgccggttttgctatcgaggttgtcgaagcaggcgcacagtgtgtccagcaacaacggagaggcggcgacctcgaatccgatggtctgcaccacgagcatgcgcatcgccttgtccatatcagaggatgcgacgaaacggtcgacgagtgcggacatggtacttacgattcgcccgtatgccggttcctgattggcgatgtcacgcaataccgcgaacccgtcgaccagcgtcaccgtgtccaatgccactcggccatgcaccacgtatacaccgtcgccttccagcacggcaagcgcatccatgcaatggtgtccgaatgcggccgcaccgtctgaggaatcggtggtggagcaccatccgaccatcaagtcaccttccagcatgcaggagacggcgcatcccgaccgttcttcgaaccgttcgaccatcgtcgatacatggttgatgccttccaccaccgatctgaaccgaaaagcgaatggcatatagatgcatgatccggcaaaacccagcgcttcgagcatcgcatgcgcttcctgcgcctcaaatgtattgacgtgcacgccgtcggccggacccatactcagatgatgcatcatgcccatgcgcgcaccgccgtcaatataaagggcagccaccggagacacgatggtggcgatggcccgacgcatcgtggcgtcgaaagtcatggtgcgttgcgtgatctccaatgctcccaccggccgggagcgactttcaagggcgatgacgacgctcgattcgtcgccgacatcgaacgcacgacccgctcgagcggccaacagaccgtcaccatcgaaaatggcgacgctttcgccgaacagcgacgcaatggtttcggccacagcctcgatattgccggtacgggacaatccctcacgtaatgaagtggacattgtgtccacctccaattgcaagtgcatctgttcgtgcacaatagcggtattgacgctctgacagatgtcgacaaaaggtacgcgagatttcaaaccaatcaacgtcaacccatgcagcctggccgcagacaccagttcgtccggcatccgcaccacaccctccaccagttcgaccaccagagcggcgacaccagcctgtgccaggcttgctacatattgtcctagcgtgccgtgccaatcggcggcgagcagagcgttgccctcgataatcagcatctcaccgcccgaaaggaagctggagacatcctctcgctcgttggtgaacacccatcgcactggcgtatcgaggtctttgccttcgacctccaccacaggatcggctcgtttgaactgcgtgttatgaagcacactgcgaatcgatacagtcatacaatctgtccattcccccgcggaacaccggtcgttccggttaacctcaccgcaaagcgtgctgttgacaataacctcagttggttacgcgggcagtcggttcacgtaaccgttcggcaacacaccagttgaaggagcgacgatgactaccacactgttcaccaacgcacatatcgccaccggagaacccggaagcacggctgcaagcaccctgccattgcaggacattctcgtcacggatggcgtgttcaccgcattcggccccggactcgcgcaacaatatgaggctcagggtggtgatctggcggccattgaggtggtcgatctgggcggcaaacttgtctgcccaccgttctgcgatacgcatctgcaccttgattacgtattcacggcccgcaagcccggtgcggtgaatgaaagcggaaccttgtttgagggcatccagcgatggagtgagaccaagtccgacttgacggtcgacgagatcaagcagcgcgcgaaaatcggcattaagaaagaaatgctgcatggcgtgcagctcattcgatcccatgccgatgtgaccgacccgaacctgacctcgttaaaggcgctgctggagcttaaggaggaattgaaggatacggtcactctccagatcgtcagcttcccgcaggagggcatgtactcctacgagggcccgcatggcgaatcgggtgccgagctggtggaggaaggactcaagatgggtgccgactgcgtgggcggcatcccccatttcgaacagtgccgtgagtttggcgagcattccatgcacacggtagttgagttggcttcgaaatacgacaagctcatcgacgtgcattgcgatgagacggatgatccgaattcccgttacgtggagctgctttcggcgctggcatataaggctggcattggcccgaaggtcaccgccagccacacctgttcgctgggatcggcggacaacgcctacttcttccacctgaccaagctgcttaaggcggcgcatatcaacttcgcctgcgcccccaccgagaacctgtatttgcagggccgtcaggataccttccccaagcgccgtggcatcacgcgagtcaaggagctcactgaggcgggtgtcaatgtgtcattgggccaggattcaatgcaggacccgtggtacccgttgggcaatggcaatatgatgctcattcttgattatgtgctgcatttggcacagatgatgagctttgaagaaatcgacgatgcgttgaagttcctgaccgtcaacggtgccactacgttgggcctgcgcgatatgtacggcttggaaacgggcaagccagcaaacttcattgtgctggacgccgatagcgtgttcaacgccgtgtatgagcgctgctcggtattgcgttcggtgcgcgccggccgcacgctgtttacccgcgaggagaccatcgacaccggactcgccctgctgtaataatccgacacaaacagtagctccccttgacaggggagctgtcgccagaggcaactgaggggtagaccacaaacgtgcacatcatgtatgcgtgtggtctacccctaagtcagcttcgctgacagctcccctgtcaaggggagcttttctggtatgcgctagctacgctatcgaaacggactactcctgcggagcgtcaccggaatcggcgggagcggattcggccggttcagtggccggagtggcgtcggctggagtctcgccatcagtggaggcaccggcttcggtttcgggctcatcggcggcggccggctcctcgaactcctcacccttgaaggtgaattcgccgaggataccctcgccttccgcatccacaatcacgcgctgaccgtcttcgagatcgcccatcaggatcttctcggagatggcgtcctcaatgtcgcgctgaatcacgcggcgcagcggacgggcaccgagcagcgggtcgaagcccttctgcgcaagcaggtccttggcggcgtcggtgagttcgagcgacatatgacggtcgaacaggcggtcgttgagctgcttgacgtccagatccacgatctggcgcacctgcggctcggtgagctgcttgaagacgatgatgtcgtccagacggttcagaaactccgggcggaactgctgcttcaattcggagctgacctggtccttcatgcgctggtagctggactcgttgttggcacccaggttgaagcccgtgttggcggccttggcgatgtctcgcgtaccgaggttggtggtcaggatgatgatggtgttcttaaagtccaccttgcggccctgaccgtcggtcaggtggccgtcatcgagcacctgcagcagcgtgttgaagatgtccggatgagccttttcgatctcgtcgaacagcaccacggagaacggcttgcggcgcaccttttcggtgagctcgccgccctcctcgtagccgacgtatcccggaggcgcaccgaagagtcgcgaagccgcgtacttctcggagaactcggacatatccacgcgaatcagcgcgtcctcatcgtcgaacaggaattcggcgagcgtcttggccagctcggtcttgccgacgccggtggggccggcgaagatgaacgaaccggacgggcgcttcgggtccttcagacccacgcgagtacggcggatagagcgggacagggcggaaaccgcctcgtcctggccgatgatgcgcttgtgcagttcggcttccatgttgagcagtttcttggactcggcctgagtcagcttgaacaccgggataccggtggtggagctgatgacctcggcgatcacgtcctcgtccacgaccatcttgacgtcggactcgccttcgcgccaggagtcttccttctgcttgcgatcggcttccagcttctcctgcttgtcgcgcagttcggcggccttctcgaagtcctggcccttgatggcctcgtccttgtcggcggcgatcttggcgatcttctcgtcgagttccttgagctcaggcggggcggtcaggcgcttgatgcgcaggcgtgcaccggcctcatcgatcaggtcgatggccttgtcaggcaggttacggtcctggatgtaccggctggacagctctgcggcagactgcagcgcgccatcggtgatggtcacgtggtggtggttctcgtaacgggaacgcaggcccttcaggatctcgatggtctcggcgatggtcggctcgtgcacctgaatcggctggaaacggcgttccagagccgcgtccttctcgatgtacttgcggtactcgtcggtggtggtggcaccaatggtctggagctcgccacgggccagcatcggcttcaacatgtcggaggcacccagcgcgccgtcagccgagccggcgcccacgatggtgtgaatctcgtcgatgaacagcacgatgtcgccacgagtcttgatttccttcagcaccttcttcaggcgctcctcgaaatcaccacggtagcgggagccggccaccatggaaccgaggtccagcgagtagacctgcttgcccttcagggtttccggcacgtcgccggcctgaatcttctgggccaagccttcgaccacagcggtcttgcccacgccgggctcgccgatcagcaccgggttgttcttggtgcggcgggagagcacgaccataacgcgctcaatctcgttggtacggccgatgaccgggtccagcttgccttcagcggcttcggcggtcaggttgcggccgaactgatcgagaatggcggaaccggacttgttctgcttgtccgtcacgccgccggcgttggccaagtcgcccttgccgtcaccggtgccggtgccggagttgccgcgaatcatatcgatggtcgcgctacgcaactcgcccagatcgacgtccatcttgatgagcacctgggtgcccacgccttcgccttcgcgaatcaggccgagcaggatgtgctcggtgccgatgtagctgtggcccagctgcagggcttcacgcagcgaaaactccaacacctgcttggcgtgcggagtaaaggggatgtgcccgttcggagccgcgttgcccttgccgatcatttcttcaacctgcttgcgggtggcatccagctccacgcccttcgaggcgagtgccttggcggctacaccctcaccttcgcggatcaggccgagcagcaggtgttcggtgccgatgtagttgtgctgaagggccctcgcctcttcctgcgccaacacgatcacgcgccgtgcacggtcggtaaaccgttcgaacatgcttgtccttcctcaattgacattccgtcctactctaccgattcacgatgacgtttattcatgagattccacgaattgcgccgtgagaggagaagaaaacgatatgctggttctagattcacccgtagtcgattacaaggaggctcgaaatgagtgaagctgcaaccaagcccgacatcgttgtcggtgtggatggttccgatgaatcctttgccgcgctgaagtgggcgcttgaggaggcctcgttaaccggccaaagcgtcaacgccgtgtttggctggacgcattcctgggatatgggatccgaaccggacagtgacgaggcctgggccaaggtccgccacgatattgccaacgagctgcgtgtgtgggtcgacaaggccgctgcaggcatcgacttcgatccggcgaatctgaagctcacctcggtgaaggcctccggcacttcggccctgctgcagatcggccatgattcgcagcagatcgtggtcggccgccgctcgctgagccgtatggcccgctggttcatggggtccctgtccgcttcgctggccgaggccgccgaagtgccggtgaccgtggtgcgcatcgccggcagcgaggatgagaccgtgaccgacgccattgccaacgccctgactccgggagacaagcccgttcactacacgcagcctcagccggtggtcgaggaggctcgccgcccggtggtggttggtgtggatggttccgagacttcccgccgcgcgttcgatttcgcactggaagaagcacgactgcacgacgcgccgctgcatgtgatgttctgctggcagctcaaggatttgggcgttattccgggctatgagaacgccgtggcaccggtgaaggtcggtcaacgccgcgccgaggagattctcgccgagctgatggccaaagccgagattcccgatggcgtcaaggtcagcacaaacgccttccatattcccgcatccaaaggtctgatcgcggcctcgcggtacgccagccatctggtggtcggctcgcgtggcctgtccgggctggacgcgcacttcctgggatcggtgtcccgccagatcgtgaacttcgccgagtgcacggtgaccgtggtgcactgattcaccgaaatcggcatggagtgctaacgcacgcctcggtgatgggtttgcagggaggaattctttattcctgcaaccccatcaccatctacttttcgcggaattcggagtttattcttcgtccgccctgttctggcgcagctgctcgatgagatcgatgacggtttcgagttcaggagccacatcgtctgaaggacgaacgttatcctcttcgtcgtccatctcatcatcctcatcatcatcggcaacggtgttgttgaggatatcctcttcggtggcctcgtcgtcagcatcagacttggactcgtcgctggaatcagctgcatcaacatccacaacggaatcggatgcgttctgtgcaacggactcatcaccggcagactgggattgcgaggtcccgtcgcctgccgcctcctcagcgggctcagtatcgacggcgttcccgtcaacagtcttctgtgcttcgatatcatcaccggcaggctcgcctgtcttgtcggtttcgccttcggcctcgtcctgggcagccggttcctgcttgcgcggacggttggccaccacgtcgatatgcagatcgtcgaaagcaggcttggactgcacccacagctggcttggctcgggaggttcgatttcggaatgctcaccgcagccgtggtccaaggaaaccacgcggccgtcatccggactccacttgttggcgcacacgccgaacatacggtcgagttcgcccgcgagcggcacgaagaaaccacaggtggagcacaggttgccttcggcggttttggtgctcaacgctttggggcctcgcggaccttcataccagcgcttggcagcctgcgcgcggcccagcgaggtcagcacgtgacggcgggtcagtcggaaggtctcgacggcgtcgttgacatcctgcagcgaggattcctcgacttcgccttcctcgatgcgctcgtcatccggatcggtaccgatcgaatcggtgggagccagatccgtgggctcaaggcgatccctccaaggaatccacttgggcggcatcaacgcgccctcagtggggatcaaggaggattcgttgacggtccaggagtcgatctcctcgtcgtgatacagcgtcaccgaccattgccatccttcgtagccacggatattcgcggcgaagcggaagtcagtgacgtgatcctcaagatcatatgaggtaacgaaatcccccacctgatcgctctcgtcggccacttcgagcagcacggcgcgcgcgatggcgtgagggtccggtgtcacgatggtttcggtggtatcagtcatagatcagatcagtcctgtacatcgaattgatccgccaccgcacgcagcaacgtggccagctttttgctgtcggcagcagatgggtaacggtgacggcgcaacgtattgccggccgcatcaagcatcttgatgaggtcctcgcagatggcggccatgtcatccgccttcgggcgggtggccttgaccaagctgggagcggaggcgatcaggcgaacatccatggcctgcggcccacgacggccgtccaccacggaatactccaccttggcccccttgcgcaacgtggtgacgccagtgggtagggcctgagccggcaggaacacgtccttgccttcctcactggtgatgaagccataacccttggctgcgtcaaaccaacgaactcgaccggtgggcattgcgaaccttccttaatcctcaatggaaatagtaaaccgaaggtacagtttacctcacagggcttgacctcacgctttgggctgagtcgcctgagtcttacgctcagagctgaaccaagaagtcttctgtttggcgtccttggttttgccggtggactgcttgggctcaggagcggcgatctgctcaatcggcagcaccacggtgaaggtcaggcctcccccatcggtgccggtggcgcagataaagccgtgatgtgctttgaccacggattgcgcgatggccatgcccaaaccagtaccgcccttttcgcgggcacgggatgggtccgcggtgtagaagcgttcgaaaatcttcgagcgcgattcaggcggcacgccggggccatggtccacgaaacgcaatacggcatatcgatagccggtctgcatcgaggcacctacttcggcagcgtcgatgaaccgccgcattgacgcgtcgctggcgggcatgcgggcgagctgtcttggatcgatggcggccggcatcacaccgagcgcggcttcagcgggcgaatcggcaggcgtgtagcggtggatgttgcccacgatgttggtcaccacctggcgcagtcgagaggcatcaccgggcagtacgacctcaggccaatcgccttcggcaaggctgaattcggcgggatggttcaaatcgcgcgccggttcgagggaaatctgcatgcggcgaacggcacggtccgggtcgagcgcatgcaaatcgtcgacggcgtcggtgaccagcgacgagagtttcaccgtgccggtcatatcgatgccgcgcccctcatcgagacgggccaaagacagcagatcctcaacaagaacagtcatgcgctggctggaccgttcgatatgttcgatggactcgtccgcacgctccaaggcaccaggcatatcgcgctgcatcttatacagctccgcatagccatggatggcggccaacggggtgcgcagctcatggctggcgtcggagacgaaccgtttcatcttgtcggtggtctcctcctgctcatggaaactggattctattcgggtgagcatggaattcagcgaggcggccagagagccgacctcggtgttttccggcgcggaaggaatacgttggctcaggtcgccggctgcaattttcgcggcggtcttctcgatgcgcttcagcggcgtcatcgtgtgctggatgatcagcgtggacagggagccgccgagcagcaccacggcgatgccgaccacaatgcagtatcgggtgagtgtgttgacggtgtcgatttggtcggccagcgacaagccgatgtacaccacggcacggtccttgccgttttgctggaaggtcaccggcagaatacgccatggtgccctcgccgtgacgatggcggcatggttggcattggcagtggggttggccagtaccttggtgatggtgtcagaggaattggagtttccgttggccggatcgttctggctgtccgcactgtcggactgcaccgtgatgatctgcttggccaccgcctgcgtagtgaatgcctgaccgagcgtgatgccattggtatcgccataggtaggcagaatcggcaccgatacgataccgtcctgcatctgcggcatcagcggggtcacgaccagaggattgccttctttgtctttggttccgtcggtgtattgaatctgcagaaagtacgagttcggccccgatgagtcattttttgacagcagatcgatattgttgaccaccagttggctttgcgagcttaactgggtgtcggttttctgcagcatgtagttgttcaccaacgcgcggatggagaaggaaatcaccgacacgccgatgagcagcacggcgatggtgcaggccaccagcttgctgctcaacgagatacggtcgatatgccgcatcagcatgtttttcttacgctcgcgctgctcttggaaatgggcggcgaacggcgacattgcaggcatgggattcgtgttcggggcggcgttcggcgtgctgctcggcggtacgccgcctgactgcttatcggggatactcatgagattgcgatacgttatggatggaggcgattagttcttcggttcgcgaatcatgtatccgatgccgcgcttggtttcgatcagcggagtcaccttgcgcttgccgccttcgccgtcgtcgacctcgatgccgtcgactttcttgcgcaggtaggagatgtacgattcgacgatggctgcgtcgccgccccagtcgtattgccagacatggtcgagaatctgtgccttggacagtactcggccctcgttgtccatcaggtagcgcagcagcttgtattcggtagggctcaggtcaaccggctgccctgcacgggtcacgtcgtgggagtcctcgttgatttccaagtcggcgacgcgaataatcggatcgtcttccacctgttcgcgggtacggcgcagaatggcgcggatgcgagccacgacttcctcgaggctgaacggcttggtgacgtaatcgtcaccgccgacggtcaggcccatgatcttgtcttgggtgtcgtcacgagcggtgagaaacagcacaggggcgttaatgccttcctggcggatgcgacgggtgacggtgaatccatcgatgtcaggcagcatgacgtccaacacgatgaggtcaggctgcactttttcgataacctcaatggcttcggaaccggaagcggcggtgtttacctcgaatccggcgaagtgcagggaagcgaccagcagttctcggatggacggctcgtcgtcgacaacaacaatcgatgcttcaataggcttactcatgcttcctagagtgtcgcgctcttctgggcgtttcctgaatgtcatcttggagttcggccttggaatccttcttgatctccttgcgccgatgaatcaccaccatgaccacgatgatgatgaccagcgccaccaataccacacccatgatgattatgcctacgatcaccgtggacgatgaggtggaggcttttttggatttcacgatttgatccatcattgccgttgccgcgccagaccagctcggcgggttttccagtaacggctgctgtgcggcttcggatagcttatcgacggttttgttatcgagaagccacttatcggagttcttggacacgacgaccaccaggttgccgtcattcgaggccacggcaagcatcactgtgttcggcttgggattcatggactccatcacggttgccgcccagtctcccggtttctgttgactattgaaactggaaagatacagcagatgcacgtgtacaccggtttccttctcggttttggcgatggcatccgtgacttcggccgcatgggagcccaggagattttccgtatccgtgatgttctcggtgatggtcacgccgctgtcggtgctgctgctggagctgtcagagctgtcgctcgagttatccccataggcatttgcagttatccacattgcgttcatcgctactgcagcaagggcgcaaatggcgcaaacaagccattttcggaccatattcccgaaggccgaataggacggctccgaagctaggaccacaatagttgtttttccgtcttcccgattcgttgttgacatatcctccaccttaacggccggtattggcaatcggccgccatacataccattaaccctctagaaaaggagcaacgatgccccaatatcaggtagattccgagcgaatccaatcatcctcggccgcagtggccacttcgatctcgcaaatcaggcaggccgtgggcggcatgtacaccaatctcaatgccttgcaggacgcatggcgaggttcggcggccacccagttcaccgcggtagccgaacagtggcgtgcggcccaacagcagatggaggcctcactcgagtccatccaacgctcgctgacgcaagcctccaccgtgtacgctgacgccgaaatccaagcttcgcgcctgtttgccagctagtttcttggctcccctcaaagaggggagccagaatacaaaaaagggactcccgaaggagtcccctttcagctcaatcagctagcgatcgtttgcggatcagtagcccatgtcggcaccggcggccggggcagcagacttcggctccggcttgttggcaacgacggcctcggtggtcaggaacagaccagcgatggaggcggcgttctgcagagcggagcgggtcaccttgaccgggtcggtcacaccggcggccagcaggtcttcgtaggtgtcggtggcggcgttgaagccttcgccatcaggcagggagcggacggtgttgatgaccacgtcaccggacacgccggcgttctcggcgatctgcttgatcggggcctcgatggcgcggaacacgatggcggcaccggtagcctcttcgccggtcagggaggtgacggcctcggtcttctcggccttggcagcagcctgaacgagggccacgccaccgccaggcagcaggccttcctcgatggcggccttggcgttacgcacggcatcttcgatgcggtgcttgcgctccttggcctcgacctcggtggcagcgccgaccttgatgacagccacgccgccagccagcttggccagacgctcctgcagcttctcacggtcgtaatcggagtcggtgttctcgatctcagcgcggatctgggccacgcgagcgtcgatgtcttccttggagccagcgccctgaacgatggtggtctcgtccttggagacgatgaccttcttggcgtggccgagcacggaggtgtcgacggactcgagcttcaggcccagttcgtcggagacaacctgagcaccggtcaggatggccatatcctgcagcatggccttgcgacggtcgccaaagcccggggccttgacggcgcaggacttgaaggtgccacggatgttgttcaggatcaaggtcggcagtgcttcgccgtcgacgtcctcagcgatgatcagcagcggcttgccggtcttcatgaccagctcggccacgtgcacgatgtcctgctgggatgagaccttgccggaggtcagcagaatgtacggatcttcgagcactgcggtctggtcgtcagcgttggtgacgaagtacggggcgatgtagcccttgtcaaaacgcatgccctcggtgaagtcgaggtccaggccgaagcggttgttgtcttcaacggtcacaacgccgtcctggccgaccttgtccagagcctcagcgatcttctcgccgacctcagggtcagcggcggagatggtggcggtagcagcgatctggtccttggtctcgacgtccttggcggcagcgacgagttccttgacgatgacctcggtggccttctcgatgccgcgacgcagggcgatcgggttggagccggcgaccacgttcttcagaccctcgtgaaccagggactgagcaagcacggttgcagtggtggtgccgtcaccggcgacgtcgtcggtcttcttggcgacttccttgaccagctcggcgccgatgcgctcgtacgggtcttcaaggtcgatttccttggcgatggacacgccatcgttggtgatggtcggagcgccgtaggtcttgtcgagcacgacgttgcggcccttcgggcccagagtgaccttgacggtgttggcgagcttgtcaaggccctccagcatgccctgacgggcttcctcatcataagagatgatctttgccatggttgcgtattcctccaaatggctaggtataccggttatcactcgcaagcgtcgagtcgtgacgaccagccgtcagctgccgattatcactctcgacctccgagtgctaacccagacattagcactcgcgcccgccgagtgccaacaccatcggcggcgattgcgctttgggcatgaaaaagccccaaccgtcgaaacggtcagggccttcaatgcacatccttgcgtgcgtgttgctcactcggagcgggcttcacccgaagacagcttgacaacatcctttgcctgcgtgcctttgccggacgaagcgggcgtatactccacgcgatcgccttcgtacagcattttgaacttattggtgctgccgtcgtccttgatttccgcgtagtgcacgaaaacgtcctcgccgccgtcgtccggctggataaacccgaaccccttcttggcaaggaagaacttcacggtaccttgtgccatatctggtctttcctttgttcccttgggcgtcgcgacacaaaacctatagggaacgtagaaagaaccgcatcgcgctccccctacctcgcgaccagatgatgattgtacagtgacgagggaacaatctcaaccgcagtggcacattttcggtacgaattattccataggcgtgagaacgctcacagttttcgatgtatttctcgccgatatcaggggcgcatcaacaacgctagttgagcaacaccaccgtaatgggaacggcgagtccttgcacctgctccacagccgaaatgccaagcgtggtcgccacatcctcagcggtggccttatcggtctcattctgataccacaccacggaagaagccggcaatgtgccgctcggattggtcgcctcgacactggtgtaaccggcggtctgcagcacatcggcctgctgacccgcatatccttggattcctgtggcgttgaccacacgcacctgcgtggccttattcacagtcgcgatggcttcggactgctgagactgctgatcggagttttgattctcattcgaggatgtcgtgtcactgtcggtatcggactttgccgaatccgaagtcgagtccttggacgaatcggtcgaagtggacgaggaatcatccttggtgctgttcttggtctcagccttgctggacgaatcggacttggacgtggtcgccgtctgggacgatcctcccactacattcttgtattctccggaaatccatgcccaggccccgacaccgcacagcgcggccaccagaataacgacgatgaacgggcagaggcgggccattaccgaacgagcgccacggtgaactcccaccggtcccttcggaggattgtcgaaggaatccggttcataggattcgtaggtcatcgtgtcgcgtgccataatcgccctttcttcctatcaaaactacccatgagtgtaatcggcaaacaactcatcagtccaccacaccacgccccatgcaccggatatgcacgtttgactacagtggtgagtcatgatcaaaccattgagcgaactggtagagccagggtgggcccatgccttggccgacgtggagcccaccatccaccatatgggcgattttcttcgtgcggaaaacgccgccgggcgcccgtggctgccggcaagccacaatattctgcgcgcgttcaccatcccgttcgattccatcaaggtgctgattgtcggccaggacccctacccgaccccgggtcacccggtgggtttgagcttctgcgtggcgccaaatgttcacccgctgccgaaaagcctgatcaatatttataaggaattggttgacgaccttggggtgcccatgcccaccaacggcgatctgacaccgtggacggaacgtggggtgatgttgctcaacagatgtctgactgtcggcgtcggacggccaaattcacatcagggcaaaggctgggaggaagtcaccgaggccgcgattcgtgcgttgaacgcgcgcacggacgccgacggcaagcccaagccgttggtggcgattctctgggggcgtaatgcgcaaagcctcgagccattgctgaccaatgccttcattatcaaatcgcctcatccgagtccgctgtccgcttcccgcggattcttcggctccaaaccattctccagagccaatcaagccctagtcaccatgggtgccgacccggtggattggactctttaggcaggccaacagtcattgtgagtagttacagtggggggcatgactttgttccccacgcaaccgaacataccttcgccgaccaccgccgcacgaccggtcgccgttcccgcgcccggcgtgtcggctccgctgggtgccgatgacgccaaacgcgcacgtatcctggccgacgccattcgggcgaggttcgcccagacactggtgggtcaggataatctacgcgaatcgcttatcgtgaccttggtggccggcgggcatattcttatcgaatccgtgccgggcttggccaagaccacggccgcccagacgctcgccacctgcgtatccggctcgttcaagcgcgtgcagtgcactcctgatctcatgccatctgatctggtgggcacgcaggtcttcgattttgcgtcgcagaagttcaccacgcagatcggtccgattcacgccaatttcgtactgctggacgagatcaaccgttcgaatgccaaaacccagtccgccatgcttgaggccatggccgagggtgccacgaccatcggcgggcagcgtatcgccttgcccaagccgttcatggtgatcgccaccgagaatccgatcgaggaggagggcacgttcaacctgcccgaagcccagatggatcgtttcatgatgaaggccgtcatgacctatccttcgcccgacgaagaggctcggatgctggccatgctcacccgccgcggctccgatatgatcggtcccgacaccatcaccggcgaacgcatttccgtgtccgacgttgattttttgcgcaaggcggcacgccgcgtgcatgtttccgacgcgatcatgcgttatgcggtcgatatcaccgccacgtcacgaggtgccggctcccgccccatcaagggactgtcgtccttggtgcgtttgggcgcctcgccgcgcgccaccatcgccttgacccgtatcggccaggcgaaggcgttgctgtccgggcgcgactatgtggtacccgaggacctcaaggcgttcgctcatgaggtgctgcgccaccgtattatgctgacgttcgaggcactggccgatggcgtggtcagcgatcagatcgtcgacaagatcgtcgaaacggttcctgttccgtgagttccgattccgttcgcaagaagatcgaggcccttggcactcagctgagcctgcctaccgtaaggaaggctttgggcgcgctggagggcgaacacgcatccgggcgtcgcggcggcagcggcgatgcgatggatgtgcatgcctatgagccaggcgacgaatcccgtcttatcgattggaagaccagcgcccgccaaggccgccccatggtggtcgagcgcgagcgcctgtcgacgtcacgggtctggttgctgatggacgtgggcctggagatgactggcgtatgcccttccggagaacgcgcatggcaggttgccgccaatgcgctgcgtatgttcgccgcactgtcgttgcgccggtcggacgatatttcgctggtgttcggcgatgagtccagtatcacccgcgtgccgttcaacggtgggttcgcgcagttcgaacgcacgctggacaaggcgcttgaccgtgattgggatcatcaccgtaatatcgacgcgctgctggaatatgcgcgccgtatcaaggatcgcgaggcattgatcgtattggccaccgatgagcatgcgatggaggagcggcatatcaccacgatccgtcgtattacccgcacccatccgatggtgctgatcgatgtggcgacgatgaatccgttcaaggccgtctcatcccgccacgctcccaccgacggcttgagtgcacggcgtgtgccggcattcctgcgcaacgccaaggcagcggccgaggtcgatactcatcgcgcgtatatggccgcggctttggaacaggagctcacccgtgccggttcccatatcattcgatccgcatccagcgaatccatgttcgatcgtttcgtcgccctggtgtcccgggcattggcccgcaccacacgcaatagactgggtactgcacccgaactggtcggactgactttggctggtgatctatgatgcacagcatgttccccatcatcccgctcgccactgatcccggcgatctcaggcccgtggagtcgttggccttgaccactcccctggtggtggccatcgtcgcatgcctgttgctggcggtaggtctgatcgcgttgatcatcatgctgtctcgccccgcacgcaaacctcggaacagcgaccgtgcgcgtggcgctcatagcaatgccagctccaaggccgagtggcgtgcccgcatcgacgatgtggtggcccgtcatgaatccggagcactgccccggcatgaggctttcgtcgaattggccgtcatcgcccgtgatttcgccggtgccgcatcaggcaaggagcttagttccagtacgctgaccgatttggcgtacctgaatcgcacgcccgcgaatcgccaaggattggacgcattgaagcagaccattggcgcgttgtatccaccggaatttgccgatgatgcccgcaaccgaatcgcccagacgaccagcgtgcagcaggccgccgagtgggtggcgaatctggtggaaaggtggcgttcatgatgccggcatggcattggccttgggccgctctgaccagcgtcttggcggcgctggcgattatcgtgctgattgtcgtgttcgcccgccataacgccgccgacgacacccctgtattctcgatggacgacgatctcaataccgagcacgcttcccgcctgttccgtcaatggcgcgctttgggccgtctcgccatcagcgtgctggtgcttgcgctggcgctggccattgtgctggtggctcgccccagccaagtggatgccggtgacgaacgcgcttccagccgagatatcgtcctgtgtctggatgtgtcggggtccacgctcccctatgatcgcgaggtcatcgatacctatttggaactggtcaagcatttcgagggggaacgtatcggtttgagtatctttaactcgacctcacgcacggtgttcccgctgaccgacgactacgaactggtcaccaaacagttgacctccgccagcaaggcgctgaaaggcgtcgagtcgcaggatgacatcgataagatgtccgatgccgaatatcaggacatcgccaattggctcgaaggcacgcagaaccgcaaggacgccacctccttgattggcgacggcgtggtgtcttgcgcggcgatgctccccggtttcgcttatggcgaagccaatcatgcgaatgccgaccgtcagcgtgcggcatccatcgtgctggccaccgacaacgtcgtgtcgggcaagcccacctattcgctgaccgaagcgttggacttgacccagcagaccaaaatcaccgtggacggcctgtattccgggccgaaagccagtgaatcggaccaaaccacaacggatatgaagtccgcgatcgagtcgcatggaggcatcttcctcacccaatcgaatggcacgtcgatagatgagctggtacgggatattcagtcacgtagagatacggatgtggagaacaaggcgaaatcctcaatggtggacgctcccggtctgtggacgcttgctctggccgtgatactcattatctggatcgtatgtgcatggaggttgaggcgatgaacggattcaccttctcccccgccttgggctgggtcgccggcggactgctggcggccgggctcgccatactggccattctcgaaatcgtattatttgttcgtcgccgtgcttccagtgacgagaccgtgtgggcttgcatacgacgtacgcttatgctgctcatcgtcgcggtgatggtactgactcccagcgtggtatcgtctaccacctcacaggccatcaatgccaccgacgtcatcgtggcggtggataccaccgggtcgatggcggtggccgatgccacatacgggtccgagaagaccattacccgcatcgatgccgcacgccaggccgtgcatgatgtgaccgccgcttatccggacgccagtttcgcggcgttacggttcggtgcttcgggaacgcttgatgtgccgctgaccccggatgcgccggccatcgataattgggccaacacgttggcggtggaagccacatccgtgtcggcgggctccagtctggatgctccgatcgatcaattgctgctgaccgcgaagtcgattcgtgaagcgcacccggatgatgcgattgtgctgtacctcatcactgacggcgaacagacctcgaatgtgacgcgtcgtacgttctcgtcactgcgccagtatctcaatgatgggtttaccgtgggcgtcggctcgaccgagggcggcaagattcccgtcatcgccgatggcgtcagtgccggcgattccaacaccacggaccactgggtggtcgacccggataccggcgaacccggcatctccaagatggatgagaagaaccttaaagacattgccgacgagatcagcggcacatatgtggccgtgaacgcttcacagactttggcggattcggtttcggccaagtcatcgaagcagtggcgcatgaccaccacggtcaaggaacgcacacgcaccacgccggtggtatggccgctggccattgcgttggcgatattgcttgccatggaaatcggtgcatggatcgcaacctcaaggagactgctgtgagaaacagtaacgaaatccacgagaacgatggctcggcgaatactcggatgcgggcgaagtgcccgctttgggcacgtatcgtcctggcttgtggcaccgtattgctgttgctggttgccggcgtggcggcagtaaacctgtccgcttcgattacgttcaatcaggccaccgcatcattgaacgccaatatcaaagcggctcaggacgagtccacggatatcaccacgctcaaggcgcaacagcagcagaccgatgcgcaattcgccgaggccgggcgaatgcgcacgcttctgttgccgcaagtcaaggacgccatcgacaccaatgcttcgatttcttccgagctgacgaagatcaccctgaaacaggccgaggcgcagaacagcggttccgattccgggcaatcccagtcggcacagcaatccgagagttcctcatccaatgccaaaaagggcggcgcgttgaccgacgaacagaagaagcaggtcgaggagctgatgaaggccaatcagcaatccaccgatacccagtcgaacaccacccaatccgagcagaaagcgacgcagaacaagggtaccggggccaccaagccgtggtgagcaatcgttcacggttgctcttttttctcacaccctcacgggtcatggctttatcgcggctgtttcccggtttcggctgtcggctttggcatttatccaattctcgataggccatggctgatccaaggtatgtccaaacaggctatttgtggataatcgttacgactatgcacaacacttggggataacttcacccaaaatcggcaagctagaaccacattggtcgttccggctggacaagcatgagtcttgtccttttagctggatatatgaatacctacaccagcaacccagcacccatcgatcccaccggcggctttgccggcaatacggtgacgccgttcgattacggcacttgcccttgccatgcggcggtacagcgtagtcgcgacctcatgtccgtccagcgtgcggccacactggcgcaatcggaccagacggcggtggccgtgaaccgctccagcaacatcgtgtggaccggtaaagccgccgatctattccgatcgcggctcagtcgcaccgcacagtattcggccagtctcgcgcaagacatggagaccacccaccgattggcttgggggtcgtcatgagcgagcacgattactggcaagtggaatcgtccgtttacggcggagtgggatatgcgccagccactcttgaagaatataccgccatagccaaggctctcgatgacgaggcggcaggatttgcggccatagccacggcttgggaatcggccgcattacagttgcagtcacatcggcatagtgcgccgatgtgcgtcaccttgcagtcgggcgatccgagcgccgttgttcccggccatgtcactgcaccatatgccgcgctggacaatcggtgttatgaccatgcaacggcatgtcagcggttgagcgatgatctgcgtggcgcggccgatctgctgattcgcgcacactctctgtattctcaggcggagatgacggctcggcgcatgtttaccgaattattgcaggccggcacacaggccaaaccgggatatgccgcggcgggtgttgccgctgtggcggcgggcggctttctggccggctggactattgacggcaaaccgaacccggcatggatgtccacgttcacctatccgttccaggaaggagtgcttagcggcgcgggcggaatcattggcggcgtacctatcggcaagagcattgcgcacaccgatgaggtcaacaaggctgcggggaaaatcgccaatttctccggcccggcgaaagacgtcgtccaaggcaatcatctggacgtgcgcgaggtgcaggcgaatgccgacgttgtccgcgcaagcggatcggtggccgagtcaatggagaatctgcgccggctcgccgaagagcggctcggcaaaatcgagctgaacagcggactcgaatatgggaccatcgccattcaacgctatgaacgatctgatggaaccaactcctggctggtcaccatcccgggtaccgatggacagcctgactcaccatttggctgggcgcagaacgtggaactgatgagcgccgatcaggagcgccgcaggaaagcggacagcgctcgcatggttgccgaggcgatgcgtcaggcaggcatcggcaaggatgagcccgtggcgctgatcggccattcccagggtggtatcgttgccgccacgcttgcctcggattgggcggaggaatataccatcgagcatgtggtgacagccggatcgccggtggccaatcatccgattccgcaacgcacgtgggtcaccagcgtggaaatcgatgatgaactggtcgccgcactggatggtgccgccaacccggtcaccgataactggctcaccgtacaagggcatgtatcgcccgcgcccgcggcaacaccatccacagtgcattcggacggctcatgcactcccggcgcaacgcccatcaccggtctgaccccatatgacgccgcacccgtggctggttcgaccaacggcagggagttgtcgcactggatcaaataccatcaggccgcctatcagaacgccaccgacctcggctcccccgccgtgcaacgccacgaagcccatttccaggaagttatcaacggagagctcaaggaaacccgctactaccaaggccgcatgacccagtccgcgaccattgcccctagcgagcgaaccaccgagttcagcacgttcggcggttaaaagtaaataccacacttgacagagttgtcaagaaaggagttaacaatataatgacgagtaggagatggctcatcaaactgatgaagcaagcggcagaacgcaagaatgtcacgtttgaaagtatcaggcaaggagggagtcatgagatattccaactcgatggacttatgattccccatcccacgtcataacgaaatcgacaacaacctcgcggacattatttgcacagaagcagaagccaaactcgggaaaggctggtatcagcagtgaaaacatatcaggtcatcgttcgtcctggcgaaaaatactggattcttgagattcccggtatcggtttcacgcaggcaagaacaacagcagagattgaaagtatggcacgcgaccttatcaccgtcatgacacaagatgttgatttcgcactcaccatagagacaaaactgccgcaatccgtgcaggaacatcttgatgaagctcggcgactgcgcaaggaagaagcggaatgcagatcgaacgcagcgcgggaaactcgcgccgcggcacaagaactacatggcatgggtctcgccctacaacaaataggcgatatactcggggtctcacggcaacgggcacatcaacttgtcaatgcttagcatcaatcggctaccccacaatgcaatcaccgcagagacgcggctagcgccactttcccgggaatgttgcgctagcatgcccgaaaaaccctctatcagcgcaacattcccgggaaagtggcgcgcaaagagtgtcaggcgcgtcgctcgatgagtgcgcggccggatgcgaggcggtcgagcacaccggttttggcgatggccagcatcagataccaggccatcacgccgctgataagcacgccgccggtgacctcggaaatcatgtgcacaatgccacgcgggctgacgaatgacacacccacgtagcgaaacagcatcagatatgtgccgtattccaaggcgaccaacgcaccggatgcaatggaaatcggcagattgaacatgcggtaacgggtcaaggcgaacggaatctcagcgaaaacaccttgcaacagcgccgagataatcacgaagcccaaatcgaactggctaccaatcaccgtttcgaccagcgtgccgataaggttcacgtacagcgccgctccgggtttgcgcagaatcagcaccgccagcgtaccggagaagtaccagacggcgtgcacgatgctggcgaaaccgggcagaatcgcgccgaataccgaagagatcggcatgtacgcgaagttgaatccccagaagatcacgccgcaggccgcacccagcgtggcaccgaccgcgatatccaacggctgccatttcagtgacgatacggcaatcggacgtttcggaagagtatgaatggtggttgcaggcatggtgatctcctagccttaaaggccgcacacagtaatcgaaccacgggcgttccttgacctgtgcggctcgggcgggaacgccgcaccacagtatagccgctcggttcacggctggaagtacccttggaggttatgaagcttaccgatatttcccccgcaatcgcattgaccccgctcgacggccgttatcacaaggccaccgccccgctcgtcgaatacatgagcgaacctgccctgaaccgcgaacgcatgcgtgtcgaagtcgaatggatgattcttctggccaacggctttgagggcaacggcaaccagccgatcgttgacggcgtcaagccgttcactgccgaagagcaggccttcctgcgcgccattcccgaggacttcggcgccgaaggcatcaagcagcacgccgctcatgaggccatcacccaccacgatgtgaaggccgtggagtactacatcgacgatcagatcgacaaggctccggccgagctgaccaacatcaacgacgagctgaagaccctcgtacacttcgcctgcacgtccgaggacatcaacaacctctccatcgcccgttgcgtcaagaacgcgatggaaaacgtgtggaccccggagttcaagcgcatcatcgaccacctcgccggcaaggccgaggaattcaaggatatgccgctgctctctctcacccacggccagccggccacgccgaccacactcggcaaggagctcgccgtctacgtctaccgtctgaaccgtcagctcaagcacatcgaaaaccaggagtacctgggcaagatcaacggcgcgaccggcacgttcggtgcccacttggccgcatgcccggatgtcgactggatcgctgtctcccgcgagttcgtcacgaaccgcatgggcctgacctggaacccgctgaccacgcagatcgaaagccacgactggcaggccgagctgtactccaccgtctcccacgccaaccgcatcatgcacaacctgtgcgtggacgtgtggatgtacatctcccgcggcgtgttcgcccaggtgccagtcaagggtgccactggttcctccaccatgccgcacaaggtcaacccgattcgtttcgagaacgccgaagccaacttcgagatcagctgttcgctgctcgacaccctctccgccacgctggtggaatcccgctggcagcgcgatctgaccgattcgaccacccagcgcaacatcggttccgcgctcggctactccttgctcgccctgaccaacctcatgggcggccttgagtccatccacccgaacacccacgtcatcgagcgtgagctggatgagaactgggaggtgcttggcgagccgatccagaccgccatgcgcgcctgcgagctcaagggcctgccgggcatggacaagccgtacgagaaggtcaaggagcttatgcgcggccacaccatcaacaaggaacaggtcgagcagttcatcgaccagcagtccttcgacccggaaaccgccgctcgcttgaaggctctgacccccgccacctacaccggtgtggccagccagctcgtcgctttcggccgctgagataggcgcgatgcgagtctctcgagtctctcgagtctcttgagtccctcgagcccctcgaatccctcgcatccaccacactactgcgctgagtcacaaaccgaaccgcaaactgaaccgaacaaggacaggcgtcaggtaaccatttcatgactactgaacaggatcagtccactacggaagatcgcccggacaaggcggcctcctccactaccgaccggccgatcgcctctggtgacggccggtcggccagttttgctgtcagcggaccggacagcccggcaaccgacgacagcaacgattccggaccatacatcgacgacatcgctccgcgccgcacgcgcgacttcggcgacctgacccgagccggtctgtcgctattgatggccgccgtggtcatggtgttcgccgtgtatctgggcggcatgacgcgcggcgtcgaatccgacgcgcataccgccgcccaagccatcaactggctggccgctttcccctccaccgtactgacgcagctggccaccacggtcatcgtagttatcgtgctcgctcagttgctcttggcccgcgaatggctgcaagctgcggtgtccgcgctggccatgtttgccggatacggcattgtgtgggtcatatcgacggcaatcagcagtctgaacgatttcaccctgccaatggcactggtctcagccgccacctcatacggctccgggctgttgcccgacatctacgccggcatggcgtccttcctgaccgccgccgggccacgccgtacccgctccacggtcaaatggagttggaatatcctgtatgccatcgccgcggtgatggtggtgctttcgtggcattcggttaccggcatgctggtttcgatggccgccggtcgcacggtgggcatgcttatccgattcgtggtcggcacgcagaataaaggcgtgtggggcaaagatctcgtcgcggtgctctcaagcatcggattggaaaccacctcactcatccggcatcaggagcccggaatcagccatggctcattgtctgccacgttggatgacgatttggcggaaggttcgcgcatctacgatgtgaagaccgcgaataaccgtcgttttatcgtttccgtcatcgacgcgcaaacccataccgtcggctatctgaagcaactctgggattgggtgcgttttaccagcgtgtccattcgacgcgatcgttccgtgcgcgacgccgttcagcatcactttgccatgctgctcggcctgcacaatatcaaactgcccgcgcccgccccctacggcatcgccgatacggacgagtccgcgattctggtgctggatgcgcacaccatcgagttgcccgccaacctgaacacgcttacccaggcggacgccgtagcgtatatgcgatatctgtccgtggcgaatcgccgtggatatacgcaccgacgcatcacgcctgatacgctcgcccggctcgaagatggcactgcggttatcgccggctggctgaatggcgacagcgcttccggcccggccaataccgcacttgacaaggttcagctactcgcgttgttcgccgcactgatcggcgtgaaaccggcagtcgcggccgcccgcgaagcttggggagacacgacgttgaccacgttggccccgttcattcagaaagtcgcggtcccctcccccacacgcgcattgggcacgtgggacaagcagctgctcaaggaactgcgagaccacatcaacaccataatcgatgaggagaccgccgaagccgccgagccggtgacgctggcccgcttctcttggcgttcgatgatcaccatgctgctggtcattgtggctgtggtcgtggtcttcacccagctgaagcccgaggaaatcatcaccgcgctgaccaacgccaacccgttgatggcggtggtgacgctcgcgttcggtgcctgcggctggatcggctcgtcgatttcgctcggcgctctcatggatcgcaacaggcgagataatacgggcgtgttcatgagtcaggttgccggaggctttgccacggtgtccatgccggccggcgtgggcccctcgttcgtcaacctgcagttcctgcgcaaatccggctatcgcaacaccccggccaccgcaatcatgagcgccgcgctcgtggtgtattacgccgtgtacttctccatgctggtgttgattggcctgttcaccggccgcaatatgttctccggcgcgataccgacgaatacgttggtccttgtgctgggcgtggtggttgtggtgctgtccattgcgatgatgattccgccgttgcgccactgggtgacccgtcgtcttatgccgctggccaagacgtatatcaaccagctgctggacgtgctttcccagccccgacagctcacagtcagttgcctgggcgcgctgttccagaacgcgaccactgggctcgctttctgggcggccctgcaagcgttcggctattcatcgaatccgattgaaacgacgttcgtgttcatgctggcctatgcgttgggttccgcagtgcccacccccggtggtttgggcggcgtggaagccgcgctgaccttcgcattcgtggcggtcggagtgccgcagggcgtggcgctttccgccactttgctgcaccgcgtggtgttctactggctgcgcattccgctgggcgcggcggccatgaagtggcttgacaagcataatcttgtctgattcgtctattttcatacccccttcggggaaatagatgtgaaaacccttataaaacgcgggttttcgcagaaacatgcgctagtatcattgatgacaacatggactaagcaaaagtgcttgtcccctgacccaagaaggatgctttatggcatacaacaagtctgacctcgtttcgaagatcgcccagaagtccaacctgaccaaggctcaggccgaggctgctgttaacgccttccaggatgtgttcgtcgaggccatgaagtccggcgaaggcctgaagctcaccggcctgttctccgctgagcgcgtcaagcgcgccgctcgcaccggccgcaacccgcgcactggcgagcagattgacattccggcttcctacggcgttcgtatctccgctggctccctgctgaagaaggccgtcaccgagtgaccttctgctcgtagcgattacttcgagcattactgacgacaaagaccccgaccgagatggtcggggtctttttgttgtggtgctgtgacgtgttgtccaaccgtattattccggactagttcagcgcttccataagctgctcgaatcccagggtgggctcggcctcgaagggatcgaggagtatggcttcccggcgttcgggggcggtcagggccaggtgggtccagtcggcggagaactgggctccgacgttcagggccgcgtccacgaaccggccacgcagggcggcacgggtgtcggtcggcggattgtgcacggcgtattccacgttgtctcctgtcagcagctcacgcatctggttgcgggctacgagcgaaccgtacaggcgaccgttggcgatgtcgtggtagtcgagctcaagctgttccatctgggcgaaggtgacgtccgggcgacggcgtttgagcgcgtcgaacagacgcttcttggcggcccagtccacgcggtcggcgagcgcatcgtatgcaccacgctccagcgcgtccagaacgcggctccactcccccataatcgtgtcgatcgtggtggccggcagcgaacttgccagcgcatcgccatgggtttcgatgaaggccttgaccgccgcataataccggcgctgcagacccagtgcggacacggattcgcctgattcgagcgtcagttcggcgcgcggattatcaaggaatcgactgaccgtgcgattggcggcagccggatcagcaaaggcatactgctcgaatccggacggaacgccatggcggaaggcgtcttcgatcgcgcacagcacaaggtgcgtgacggcgagcttcatccatgtggaccattgcgaacggttcgagtcgccgatgatcacatgcagccggcggaaggagtcggggtcggcgtgcggttcgtcgcgcgtgttgaccatcgggcgggagcgggtggtggccgaggagacggcctcgtccaggaagtccgcgcgctgggtgatctggaagccgtccggggtcatgcggccggcaccggtgtacagctggcgggtgatgaggaacggcagcagctggtgttcgatggtctccaacggcacgaagcggcggaccaggtagttttcgtggcagccgaaggcgtggccggcggagtcgacgttgtttttgaacacatggatcgtggcgtgtgcgccgtaggattcgcgcagcttgcgctgggccttcagggctaggttgcgcatcacgtgttcgccggcgaggtcctgggccagggcctcgcgcgggtcgcgcgcttcggcggtggcgtattcggggtgggatccgacgtccagatacagacgtgagccattggccagatacgtgttggtggagcgggaacgggagacgatgggctggaacatggtcatcgccacctggccggcgtccacggggcgttcggcaccggtgaccgccacgccgtattcggtttcgacgccgaaaatacggcagaacccgtccatctcggcggatggtacgggttccgtggcgtgcagggagcgggtgccgctgtcacgcagttggggcatcactcgccgcctttttgcacgaagctgttgacgtattcctcggcgttggtttccaaggcggattcgatgtcgtcgaggatgtcgtccaacacgtcggcttggtcggtggactcggtttgggcggcggcctgcgtggtggcgagggcgtcgtcttcctgggtcgcggcctgctgtgcttgaggttgttcgaattgttgtggcatgttgtcttctttttgggctgtcaaactcccctcagtcagccttcggccgacggctcccctcacccgaggggatccggaggagtcaaaaaattatcgctggttgatggagtcgagccacggatactgctgcaggtaatgctgcagttcgcggatgatgagtccattggaggccactacatcgttatcgtgacgccagtggatgcgttcgccgtcccaacggctcagcgtgccctgtgcctcccagaccactacggtgccggcggcgatgcccgcgatatcccacacgtgcagcatcggctcgaagtaggcgtcataggtgccgtcggccactttgcacaggtcgagcgagacggggcccacgcgcttgatgtcggccgggcgtccggcgagcgaggaggccacgtcgagcgcacgctgcgattcgctggggatgaaggacattccgtagctcagcacagaaccatccagcgaggaggtcatcgacggcacgaccttgtcgcgcttctcgccgaccgcggttttgtggatgcgcacggcacccgctcccctggcggccaggtaggtcaggccgagggccggggcgtgcacgatgccgatgatcggcttgggctcgttgtccgggccgaattcgaacagggcggcggtcaccgtccattcgctcatgcgacgtacgtagttgatcacaccgtcgatcttgccgatgtaccagtaacgctggccagggcggctttcggcggggcgggtggtccagaagccgtcgaagtgggcgatgtcggcgattctggcgctcatgaagcgcatgatcttgttgtccacttcgagcttatagcgggggccacggtccgcgttctcggtgctcggctgggcgaggttacgcggattgagttggtcgtggagggcatgctggccggcttcttcgagcaggccggcgactttgagcgcaaggttgcgcaggtcctgtggggtctcttcgcgtgtttcttccatagctaccaagtctatcgttcggcgttgatggccagcgacttcagcagatcgatggcgtgttcggctgaattgagttcggtttcgcagtgcgccttggtgaaggcgagcggatcggagatgtcgagggagaacaggtgatggtcggtagcggccatatggccggcattgccgtagaattcgaccgcctcgccctcgtctgcggcgcgcgggtcgcgaacagtgagtcgggaccagctggcggcggccacctcatcgccgaattgcgccacgagttttgccctgagccaggcgcgggtgtcttccggcggttcggtggtggcgcgtgcgatgtcggcggcgctcaccacccgttcggtgcggggttcgagtttggtgaagatgctgtccgcggggtcgagcgccgcccatttcaggtcgatgaccttcagtcgcggatcattccatccgttggccacgccgggtgcggacgttgtggtgattttgcggcgcagtttttcgagcagctgccatttgagcagccattcgatgcggctggcctcgccggtcatggccagacgttcgtcatcgtcggcggcatggcggatggaggcgcagtcgatgagcgcctgctgccacatcgccataatggatgtggtggatttgtccggccaggcgggctcgccggcggtgtcggtgccttcgaccagtgcggcgacctggtagacggcttggcgcagtttgagctggataagccatgcgttggtttcgccgccgttggccagcggcaggcttgcgcccagcgtcaggtcgtgggagacggtgtgcatggcttcgaccgggtcggccagttcgagttcgtcgaggaaggcgttcagatcgaatccggcttcgtccgcgtgttcgagcagccacagcagcatgcttgtggtgccgagtttcagggcctgcggtacctccatacggttggcgtcgccgacgatgacgtgcaggcggcggtattcgtcggtggagtgggattcgtcgcgcgtgttgataatcgggcgttcgaaggtggtttgcaggccgactttggcgtggatgtagtcggcgcgctggctgagctgatagccggggatttcgctgttctcgccgattcctacgcggccggagccggcgtagatctggcgggtgacgaagtggagggtcatcaggcgcgtgactaggtcaaatggcactgagcgggccatcatatagttctcatgcgtgccccagcaggagcccttgccgtccacattgttgcgatgcagggcgatgggggtgccggtttgtgtgcgggcgcgttcggtggcggcctgcatgatgaggtctccggcacggtcatagcggaccgcttcgaacgggtcggtggtttccggtgccgagtattcgggatgggcgtggtccacgtagacgcggccaccgttgggagcgatcacgttggtgatgttgagttgtggggcgtcggtgagcatgtccgggcgggcggcggcgcgttcgagtcgggtgccgcgcgcgtcgttgaccgggtcctcctgccggtagtcccagcggatggatttgctgtggctgtccgcggcgccgttcaccacgtcgaaggacagttgcaccgggttgtagcggtccggggtgttcagggataccgcgtattcggtttcggtgcccatcactcgtttgacggtcatgtagtgctccttgagcttgagctattcggcggtgcggatgcggcggatcgggtccatgccgttgatgcgcgaccattgttcggggtccacgtcagccatggaatcgcgggtctcgcggtattcgtcttccacggcggcggcgagcaacggcacggtgagtgccacgtccgagccggtttcgatggattccttgaccgctcgggtcttggcccggtccacgatgttcttgagcatcgcgccggagaccacatcggccaggaacaacgcatgccactggccgttctcctcctgcacgtcgcacagatggcggcgttcggaggctccgtagatgtcatgcaccagcacggcggacaaggcgtgcgcgtcgacgccatcttccagaggcaggtcgtcggtgaggtaatggtccacgatggcgatggcctgattggctttgggccgaccaacgcgaatcttgacgtcgagacgccccggtcgcagcacggccggatcgatcatgtccacacggttggatgcgccgatcaccatcacattgtcgagtgattccacgccgtcgagttcggagaggaactggggcacgatcgtggtctccacgtcggaggagacgccggagccgcgggtgcgcagcagcgaatccatttcgtcgatgaacacaaccaccggattgccgtccgcggcgcgttcacgggcacgctggaagatcaggcgaatcagccgttcggattcgccgacgtatttgttgagcagttccgggcccttgacggacaggaacacgcccttgacatgggtttcggccgggctgatcgagccgtcgccattcgtatcgtaaccaccctcgcacagggcgttcgccacggccttggcgatcatcgtcttgccgttgccgggcgggccgtacagcagcacgcccttcggcggcttcagatcgtagcgctcaaacagcgcacgatgctggaacggcagttggacggcgtccctgatacgaccaatctcactatccaagccgccgatgtcggcgaacgtgacgtccggggtctcctccagcaccagatccttgtcgccctcggcgggcagcgcttcgatggcgaggcggacggacggatcgacgataatgcggtcgccctgattgatgcccgcatacgcgagcgcgccggaacggcggatgagcacgggattgccggaggcgtcggtaacgatcagtcgaccgtcgtcaagtacctgcttgacactgcgaatctggcccacggtgtcagcatcgcgctgctcgaccagcacgagcttctcgttgagcatcacggtggccccggcggtcaggcgggcggcgttgacgttggaggccacaggcaccaccatgcggcgggtgccggaaatgacttcggccgacgcgtgctggatgccgtcttcatcggtgcgggtggaatcgaccttgaccatggtggcgaaggtgagcggcggctgagcgagctgggcgagctgtgacttcgccttggtcagttccttgccggcgcggctcagcgcttcggcgagcgcatggttcttggccatcaggcgatcgttcagcgcggcgagatcttcggtgtcgctcatgcgggttcttcgcttcccttctatccgggattgtcggcaacttatggcagtcggcagaccctattcgttgccgtcggaggatttcctgttacgtatcacagtacgcacttttcgcaccacgaaccatacgatgaccacaatcacggccacgatgaccacgtcctcgaacacgccgagcgcgccttgaatcgagcaccactggtcgccgagtaggtaaccggcggaaacgaggatggtgttccacacggccgagccgagcagggtccagccggtgaagtgcaggaagttcatgcggttgaatccggcgggaatcgaaatcagcgagcgtaccacgggaatcacgcggccgatgagcaccgaccatgtgccgtattgggtgaaccagtcgttggctttgctcacttctttgcggctgacgccggggattttgtctgccgcgagattgatgcgatgcaggcccacccagcgggagatgccgtacaaggtccaggcaccaagtacggagccgatggtggcccagatgattgcgcccggcaaactcaaggtgccgcgtgcggcggtgaagccggcgagcggaaggatgacttcggacgggatgggcgggaagatggattcgagggcgatggccaaggccacgccgataccgccgatggtttccatcagcatgatcagccagtcggtgatggtgccgatcaggccgggttcggtggtggtgcagatgggcgtagggtcggtcgcaagaatagtggcggctgccatggaaaaactcatagagggcattgtcccaaggttttccaagaatcagaagcatgacgcaagaagatgtgcattttattgacaagtccgccgagagcgaagttgggagcccggctggttctgcggtttctgtgccgacgctgagcaagcccggcctgctggttatggatgtggactccacgctcattgacgaagaggttatcgacgagttgggcgtggtggctggctgcggtgaggagattgccggagtgaccgcacgcgccatgcgcggcgaactggagttctgcgatgcgctgcgcgcacgagtggccctgttggagggcctgccgatctccgtgttcgacacggtgcatgacaagctgcatttcaccaagggtgcgctggagcttatcgacacgctgcatgaacacggttggaagatcggcgtggtgtccggcggcttccatgaagtggtcgatatgctggcggccgaaggccatatcgactattggatcgccaaccggcttgaggttgccgatgggtgcttgaccggcaaggtgctcggcgaaatcgtgagcaagactgtgaagttgcacgccttgcagacatgggcggaccgtttgggtattccgatgagccagaccgtggctgtgggcgatggcgccaacgatattccgatgattcaggccgccggtctgggtctcgcgttctgtgccaagccaaagacccagctcgccgccgacaaagccatcaacgaccgcgacctaacccacgtactcgattacctgcgccggtaaaattttaccgacctcggctccggcacttatagttgagccatgactacttcaggcgcagaacagttgacgcttgcggggctggctccccgcaagcgtcgtaaacgtgcgcctgcggaacatacgccggccgagcagcatcccatagcgcaagtcgtgctggatgtgcaggcgctccacctcggtcagacattcgattacttcattgatgaaaaagacagcgaggccgcacaaccgggtgtgctggtgcgcgtgcggtttggcggtcagagggtcagcggtgtgatttgggcacgcaccgataccagtgatacgccgcgctcttcgattcgctatatcgagcgagtgctaagccccgatgtactggttcccgcttcgatgcgcgaggatatcggtctggttgccaaagcctatggcggcacacgggccaatattctgcgtttcgccgtgccaccgcgcgtggccaaggtggagaccgagcagcggttggccgcgtcgttccgtcggccggtcggcggctcattgccggataatacgcaaggcggttttgccgggcgtggcaccaatcccgatgggaccaaacctgctggctctacctttgccgttgctagcaccgtttcggagggagctgcgcaggggtatcgtcgtctgaccgccaattacgccgatgtcaatgtgcttcatgacgcgcttaccggtcaacgtttccaatcttttgtgtttgattcgttgcccggtgcacaggagtggcaacgaaacatggcatggatggtggccactgcgttgagtgccggtaaggctgccgtagttgaattgcccaccatgcgcgaggtcgaagacctgatgcacatgctacgcaattatggactcaaaccatttgccccggctccaaccggcggatggatgggcgatgtcgccgtgctcaatgcggagaccatgcctgcggccgaccggtaccgcacgtatctggctgtggcgttgggccaggtgaaggtggtgatcggcacccgcgcggtgatgtatgcgccggttgaaggcccggcactgttcgccattctggaggatgccgcctatcagaacatggacggtatgatgccgtatccacaggctcgcggcgtgatgcggttgcgcgccaagtcccatggcggcgtattcgtggccatggccaatgcgcgcactccgcaaagtcagtgggaaaacaccggtccaggtacggtggaaactccggtgagcggctattccaccgcgattcatccgctcgcctcgccgctgaaggatgcgacgccttgggtgcgttggctcaatcgcgatgagcttgcgcgtctcgctgacccgtccatcggggcgcgcgtgccgcatacggccgtccgtgtgctatctaaggctttggaaagtggccccgtgctgctatccattccgcaagacaatgtcagtgagaccttgagctgtgcgaaatgccatcgtcaggtgcgttgtgccaagtgttccggaccgttgcaactgccggccgaccgtcgggattctacaccgcgatgccgctggtgtggggctgccgccatcaactggaagtgcccgggctgtgggcatgaacgtatgcgcgtggtgcgtgtgggggctgccggcactgcggcggagctggccggattgttccgtggcgtgccagtagttttgtccagcaagacgcagggtctggtgcgcgatgtagcttgccagccgatgatcgtcatcgccactcccggtttcgaaccgcgcgtgcgtccggtcagtgccgagcagggatcggctggccatgagtatcgtgccgtggccgtgctcgacgcttggaccagcttgtatgcgttgggcgtggatgctcgcttggatacattgaccgcgtggatgcgtgcggtgtcgttgtgcgcgccgcgttcccgtggcggccaggcgttgattctcggcgaaaccgacccggccatcgcccaatcgctgatgctctgggattcgaggattcttgcagccaaggatcttgaggagcgtgtggagaccggtatgccgccggccgtggccgccgcctgcgtatggggacgccgtgatgcggtgatgacgctgatgcagcgtatcggcgccctgggcggcgattggacggcctgcggcgagctgcccggcatgttgggaccggtgccgatcgcgcaaccggacacggttgatgccagggagctcgaagccacggccgaccgggtgaaggcagtaatccgtgtgccacagagtcggcgagccgaactggcggcccgactgcaccgggaaaccgctcgtcatgtagcgtcccgcgagcccggcgagcttcgcttccgagtagatcccaaagatctgatctaatcgtctccaacacgtgaaacgatgattacagaacgaacatcgctataaggaggacaccatgaagggttggcccggagagccggatatggattacgacgtgctggtcgcggacggcgaagccgccgcgaacgccggcaagccgatcaccgacgtgatcttcgatttcggcaacgtgctgatttactgggatccagtggccgtgctcatcccccgctacagccagaagaccatcgacgaattcctcgacaacgacatctccggcttctacgatgtcaacgacctgatggacggcggcaccagcaccgacgaggccatcgccatcatgcgccgtgacaggggcgataagtgggcggacatcctcgactactacatcaagaacttccgcgactccctgaccggcatcgtgccgggcgcacgcgtgctggtcaatgacctgaaggccgccggtattggcgtgtggggcctgagcaactgggaatccagccttttccacgtggccgaggaacagtgcgatattctgcagcagcttgatggcaagctcgtctccggtttcgtcaagctgcgcaagccgcacaaggaaatctacgaggccgcgttgaaccagttcggcatcaaggccgatggcgcgttgttcatcgacgacaaggccatgaacatcgtcggttcgaatgcggccggcatccgtggcgtgcgtttccaggatccggtcaagctgcgtgaactgctcatcgccaatggcgtgaacattccggccgtgcagtgagcatcgacgttttaaggaggaccatgctcaaactcgtgttcgccggcacccccgatgtagcggtgccctcgctcaaggcctttgccgccgatccacgttttgatgtggtcggcgtcatcacccgccccgacgcgcctaccggccgcggccgcaagctcacgcccagcccggtcaaggcgacggctctggagctcgggttgcccgtcatcgatctcaaaccccgctcccccgaattcatggaagcgctgaacaacctgcatgcggatatcgccgcggtcatcgcctatggcaatatcctgcctaagaacgtactcgacgcagtgcccatgggctggtacaacctgcatttctccaacttgccgaagtggcgtggcgccgctcccgcccagcgtgcgatttgggcgggcgacccgaccaccggcgccgacgtgttcaaggtcggcgagggtttggacgatggcccgatcgtcgcttccctgaccatcgagctgaccggccgtgagacctccggcgaactcctcgaccgtctggccgaggaaggcgcacccatgtatgtggatgccttggccgccgtgggtgaaggcactgccacattcaccgcgcaaccggccgaaggcctggaatacgcgcacaaaatcacggtggaagatgctcgtatcagctggacggacgaggccgaggccatcgaccgtcaggttcgcgcctgcacgccacatcccggggcatggaccgaactgtttgcggaggggccaatcgccgataatgacgagccggccgccaaacccctcaccctgcatattctcgccgcgcaaccggccgaccagtccaatcccaacactccggccgagcttcagcccggcgagctgaaggtgagcaagaagaacgtgtgggttggtaccggcagcacgccgctggaactcacccaagtcaaggcgcagggcaagaaggccatgcgcgccgccgactgggcccgaggcgcgcgcctctcccccgccgcctgcgtgcgataacaagcaatatcgctcccgcccggaagcacagcaaaaagcccggcatcttcgcgaggaagataccgggcttttcagctatgcaatcggcgatcagtcgagaccggagagcttgttgatcagctccgggtcacgcgtcgcacccttgtcggccgagcgggcgaaggcggcgtacgccttcagcgcctgggagacgtggcggttgcggtgagccacgtagccgtcgccagcctcaagctcgcgacgacgctcgtccagctgctcgtcagtcagttcgacgttcacggaacgggcttcgatatcgatatcgatgatgtcgccgttcttgataagcgccaccggtcccttattggcagcctcaggcgccatgtggccgatggccagaccggaggaaccgccggagtagcgaccgtcggtgagcatggcgacctgcttgccgatgcccttgcccttgacgaaggaggtcgggtacagcatttcctgcatgcccgggccacccttcgggccttcgtaacgaatcacaagcgccatgccgggcttcagggtatcgttcagaatgacctcgatggcctgctcctgggagtcgaccaccagagccggtccacggaacttccagatctccggcggaacaccggcggtcttgaccacgcagccgtcgggggccaggttgccgcgcagcacggcgaggccgccttcgtgaatctccgggtggttgatgtcgtggatggcgccgttggcgcggtcacggtcgagcgaatcgaacagggtggtgtgggtccacggctccggggagatgatgtggccaggagcggccttgtacatctgctgggcttcctcggtgcaggtcgggcgcatgatgtcccaatcggccagcttggcttccagcgtcggatagtcgatggagtgcacgttggtgtgcagcttgccggcgcggtcgagctcgccgaggatgccggtgatgccgccggcgcggtgcacgtcggaaatctcccacttgccggacggcgaggccttgcagatgcacggcacggtgtgggaaatacgctcgatgtcgtccagagtgaagtccacgtcggcggactgggccatggcgaggatgtgcagcacggtgttggtggaaccgcccatggccacatccatggtcatggcgttctcgaaggcttccttggtggcgatggagcgcggcagcacggaatcgtcggaatcgtcgtagtactggtgggcgatcttgacgacctgcttggcggcacgctcgaacaggtccttgcggtaggagtgggaggcgaggatggtgccgttgccgggcagggccaggccgatggcctcggtcaggcagttcatcgagttggcggtgaacatgccggcgcaggagccgcaggtcgggcagacggtcttctcatagttgagcagttcctcatcggagacgctgtcgtcggcggtggcgtacatcacgtcgataaggtcggtgctcttgacggtgccgtcggcgagcaccgtggtgccggcctccatcgggccaccggagacgaacacggtcgggatgttgaggcgcagggcggccatcagcatgcccggcacgaccttgtcgcagttcgggatgcagatgagtgcgtcggcacagtgcgcgttgcactggtattcgacggtgtcggcgatgatgtcgcgggagggcagggagtagagcatgccggtgtgacccatggcgatgccgtcgtccacggccatcgtgttgaactcgcgcgggatgccgccagcttccttgatagcctcggaaacgatgcggccgaccttgttgaggtggacgtggccgggcaggaactcatcgaacgagttggcgatggcgatgatgggcttcttgcccatgtcgtctccgttgacgcccgcagcacggtagagggctcgggcgcctgcaaagacgcgccctgacataatttttgcagatcgcatttcagtcatggttctattcaagcccttgtgagggacacgccacttgtcaagagtcgaataatggaatttgcaaaagcgtaacgtttctcacacatatttttggaatacattcctccactggaagtctggcggaggtccggcagaagtccccccaaacggctacacttgcttcggttgagatagattttccaatgtctggagataagaacaatggcttttggtactgacccgacacccgacggtcttgcgaacccgccgatcgacgacctgatgaagcacgccgattccaagtacgcgctggccattttcgccgccaagcgcgcacgccagatcaactcctacttcacgcagctcaacgagggcctgctgcagaacatcggcccgctggtcgaataccagaacaatgagaagcccctgtccatcgccttccgcgaaatcgacgagggcctgcttgaggagaccttgggcgaggacgacgccaacgagggcaactgatcgattccgacaattcgtttggattgtttggacagttcgtcgccgaatgatggtgtgagagttctctcacaactgattttgagcgacacgcttgcctgagttatcgcaatcggctataactcaacatcgggagcgaataagacgtaaggctcgcgccaccgcgctggttagcacgagcctttatttatgcccgcttccacagtgacaagtaaaaattgacaccgtatcattgtgcctcgcatcccgcggggcgataagtcctgaagaaagggatgatatgacagaagaacatcggcttatttccgccgaatccgtgaccgaaggccaccctgacaaggtctgcgatcaaatctccgacgccattcttgatgatttgctggcccaggattcgtccagccatgtggccgtggagacctccgccgccaccggcgtgttcctggtcttcggcgaagtcacatccgaggggtactgcgacgtgcagtccaaggtccgcgaaaccctgcgcaacatcggctacacctcctccgaggtcggccttgacgccgattcctgcggtgtggtcgtggccatcaccgagcagagcgccgaaatcaatcagggcgttgcccgtctgactggcgatcaggagaccgccgccagccgcgaagagcgttacgaagcacagggtgccggcgatcagggcgtgatgtttggctacgccaccgacgagaccccgacgctgatgccgcttccgatctacttggcacatcgcctcgccttccgtctgaccgaggttcgtaagtccggcgaagtgccgcacctgcgcccggacggcaagacccaggtgaccattgagtatggcgatgacgataagcctgttcgtctggacaccgtgctgatctccacccaacatgatcctgaggttacgcaggattggcttgctgttgagctgaagaagcacgtgattgacccggtgcttgatgaggtgctgggttccaaggtgccgcatgacaactaccgtcagctggtcaacccgactggttcgttcatcctgggcggcccggcggccgacgccggtctgaccggccgcaagatcatcgtcgacacctacggtggcgccgcccaccacggcggtggcgcgttctccggcaaggacccgtccaaggtcgatcgttccgccgcgtacgccacccgttgggttgcgaagaacatcgtggctgccggcctggcccacaaggtcgagatccaaatcgcctacgctattggcgttgccgacccggtatccgtcaacgtggagaccttcggcaccgagcaaggcgtgacgcgcggccagatcgccgccgccgtacgcaaggtcttcgacctgcgccccgccgccatcatcgacgagctcgacctgaagcgcccgatctacttgaagaccgccgcgtacggccacttcggccgcacagacgttgagttcccgtgggaaaagaccgacaaggtcgaggagctcaaggccgcgattgctgcggagtgatatcgactagtccaagaaggggtgtttccgctgatgccagcggaaacaccccttcttgtatatgagtctagtgctcgttcttcgtctcgctttgtccatccgtattgtcggtatcatcgatgtcgaatccgcccatgagtacgaaacgcttcaacatattggtggcgcgcatacgcaccttgaacaccggcaatgccttgtgatcatgctgctcaaagaaggcttttgcccgttgcacgtcaagcgaggaacgcagtgcatcgaaacgtccgaactcgttgatgttcgcctcgtctatacgtttggcaaggaattcctcgaccaccgatctgttgacacccaatcgatcgaccagtttgtcgacttgctcgttcttctcgcgtgcagcatagcgcgtgatgtaatcacgtagcgtcataccggcttcgacctccacgtcgccacgctccacgtcatgcaggaacagttcagcgagtcgttgttcatcccgcgagagcgcggcaaaggaccggtgcagctgcgcagacatctctgccagctccgggctattctccttgagcgccttcagccatttatcgaagttggcattcatgtaatcggtatcgatgagtccggtatcaatttcggtgaggtaaccatccagttcatatggcgcttcaggattatcgttcacatcatcatctgggtcactaccgcgatcgctattgccatcgaacagttctttatagcgttgcgcaagaatgaggtacgtacgttcgtcaatttgaggacgcaccacttcagactcgccatgctcatcattgtcctcattcgtatcgtcagtatccgtgctatcgaccttgtattccgtggtgctccagtcaaagccctgcactttcgccgcttcaaggtaccgattcagttccacgaactccttggcaaacttacgtctagcctctaccgactccggcagctgcataaggtccgattctccgctgtctgagaatacgtcgagaatctcacggtaccgagtatccatggatttcacattcgctggcaatttctgtacgaacaggtcgagcggtcgatcacccgaatacagtttcacagctgcctcgatgaaaccatgcatggtgtacggcttacggtaatagcggatgacaccaaacggcttatctgggccaaacagacgattcgtacgactgaacgcctgaatgatgctttcgtagtcgataatcttatcgagatacagagtattcacccatttcgagtcgaacccagtgagcatctggtctacgacaatgagcaaatcaagctgctggctgcggttcgttgctataccaccatacggactcttgtgcgacagtcgcgaagaaatatccttcttcatcgccggccatgtaggaatgacgaattctttgccgaacgcctcgttgtaatcggcgatgatttcggtcagcgcatcctctttgcctatcgctccttcgttgttgtcgatattgggatcgaacaacgccgtcacatgcaacttgggtgcctgctgcttgaacaagtgataatagttgacagcttcaggaatggaactggcagcgagcatcgcatggaatttgcccgcatggctgagcaccgggaactgttcaagaatgtccgagaccaccatgctcgggtgcggagagtcgataccatattggtctcgtccaaggaaatcctcgatgccactgatgcggttcccggcaccatcaaccatcggacccatggggacctcagacttatccatgtaatgctggaatactttggccttgaccgggtcgacgagcgcatcttccgtactctccgccttcgccttgtcgagagccacggcacgtctgacttcagaatccttgtacgtggtcaccatgtacgggtcgaacccgagcacattatggtcgcgaatgccgtcggcaatgctgtatcggtgcaaacagcggccgaataccatggcagtagtggaattcttcttttggttctcatccagaatgggtgtgccggtgaagccgaagaacagcgcattcgggaaggaacgacggatgtcctgcaacatgtcaccgaatgtggaacgatgacattcgtccacaataaaaacgatacgtcgtgcagccagctgatccagccatgcctgggtgacgccccgctcccctgctttcacgttgctcatcttctggattgaggtgacgatcagggtgtcgttgacattggtgctgttgagtttatcccgcaaaacgccggtgttctcggtaccctgcacttccgtctcgctgtcagcaaaactgcggtattccttcagtgattgggtgcctagctcgatgcggtccataaggaacacgactttgtcggcgtcatgcgagtccgcgatgagttgcgccgatttgaagctggtcatggttttcccggaaccagtagtatgccatacataaccaccgggtcgtcctggggtagctggctgctgttcccaatcgcatttgcgcaccacgtcagagatggcgtttgcggcgatgtactgatagctgcgcagcaccttgagacatccgtccgccgaatcggcgatagtgtaaaagccgatgagctgatgcgccatgggaatagacagcaggccggcagtgccggaagtgccgccgataaacagcttccattcgtctttactggggttttgcccaccgcagataggctcgttattgtagtcagcccaatggaagtaatagcttggattgaatttgtctacgcccggattagcgaagtagacggcatcgtcggggttcatggccacaaaaatctgtacgaggcggaacaacccggtgaacacgccttcgtgcgcgtatttctcaatctgattggtcgcctggctgattggtatgccacttttcttgagctcgatatgaatcaacggcatgccattgatgagtagaacaaggtcgccacgccgcgagttcaacatcttgttcttagccggataaaccggttgctgagcgatctgataggtgcttttgccgcctgcaatctccttgcggtcatagatgtagagactgacttctttgccgaaatgcgccacatcttctttgttgtcacgtgtgatagacacagtacgcccattgacgaacgaattaagcgcgagcggagttcgtagggtttcgatctgttcaataatctgtgccatttccccgtctgtcagcgggtattggccaagtcggtctatgtcgttgttattgcggtataggatgcctttccaattgtcgagcaaatcttgctcggttggataacgcaatacgccgtccttccacccatgctgtttgagcactgtgatgacgttttcctcaaacactgattcactatcgaatatcatgattctttccccctcgaacttcccaacgtcctgcttttcgcgagccaacacgcttgagtaatccgcgccccgtgagtatttcagcatctcttcgcacagtcgctgatgaaactcccgcggcacgcgccatgtcatcatatgttgctctggggttcttttctacaaagcaaagaacaattcgctgcctttcggttatctgctcatccagaccatttaactgctcattattgtcagttatctgctcatccagaccatttaactgctcattattgtcagttatctgctcattgtgaacgaatagacgctcatccagatcggacttggtatccggctccaacataagcgtaagcaccgtacgatcggcctcaccgaaactctcctcaatccgcggttcaggaagccctgcattcgcccatgtggcaaacacatcgggaacacccgtgccggcccgttcccccacatcaatgaggctgaacatcttcataacaagaccgttgcgcggatcggacactccaccgaggcgcatctgctcaacacctgtccgaatatcgcccggattctcaaacaccaatctgtcaggggtgcgtcgaaccactactccgcgcacgccataataatcggcgttgaacaaacagttggccaacgcttcacgaatcgccttgtgcataggggtatcgtcaacacgaaaaataccttcaagcttgaacggagtcttcagagactcagcaagcttaaggttcacccggaaaaagaaatcaaacagattgcctgaccacataccatcgcccgaatggacacgatcagtccaacgaatcgtcggatccagattctcctgataatcaaggaaataatgcggacattcgcggacaatgtcataatcgttgccgaacataagcagaccgccgaacgtaggatgaagcttaccatcttcacggctcaccattgccgcgccaacagcacgcagaaaacgctcgtcatcaagttcagtccaagaactgccctgacgtaccgcacggaaacgattacgatatgcccgcactgtgtctgtattgaagtcggcaacggtgagatcgtccagcaccttggaatccatcgtctcagctccctgatcccggagcattgctgagatctcctgccgcgtgcaacggtagtcgccctcaccacgccgacggtaggttcccccgaagagattgtcgttgatatacacggggcgctcgtcacgcggagcgcgcggaacatgaatggctaccaccatcccaccatccgcttcgagcacttcaacttccgattcgatgggcagcacagcgcttaccttggaccggttgccgaccgtgttccaaaaatcctgacgaaggtgctccgcttccactggtgtgagtccgactgtttcgaatgcaccgtcttcacattccttgacgccgagcagaatgacaccgccataggcgttggcgaaggcggagtacgtctcccacatactgcgtgggaggccaccctttgctgccttcgcctcaatccgattattctcacgatatgaggcaagctttacgatatcgaacgtttccattacgccacctcccctcacacgaacatcttgtcaagcaaagatttcttgatatcctgcagcaattccaacttacgctgatgaagggtgatgaggtcatcaagacgggagaagaaagttccgattgcctgctgttcagccatatttggtatgtcaacaggatatggctcaatgtgcttgttattgatctgcggaatggtcgaagtatctgcgatccgataaaggccggtctgattgatgaacagccataggaaatcagcatctacgcccctgggctccagagccatcatgttcgtgtcaatataggcagttttccccagaactctaaccttattgccaagtattgctgctcctcttttcgcaaaaatgatactgcctttgcggataggtttaactgctgtgttggcgtctaccctctgcgcagaatcaaattgaaaatgagaagattcattcagatcatcaactttgacataaagaaaatttcccgcagaaaatgcgctgggtggagctccagcaccaattgacacaatctctcccaacttacgctgttcccaagggtcagtaaaaccagcaaagcgaatttcgggtacagattcgccatccttcgggaacattttttcaagcatcgattttttgaagatgacgagcttgtcatacttacgctgatgaagggtgatgaggtcgtcaaggcgggagaagaaagcaccgatgaactgctgttcgacagaggagggaagactgacggtcatgtccgcgagttgcctacccgatatctccaagaatgtagatcccgaagctttttcttctgcccatttcttgattctcgcactcatcgaatagacaaaataaacattggcatcgtttattacaagggattggaacccctgattcgtgcatgcggaatgccgcagtattgcggtattcccgatacctgcacggctggtgaaaagaatcgtcttgtcagccggcaacatcttagcagagcagctttcgagtcctgcccgagtgattttgcgtgcactgctttccgcatatatgtcattgcccagttcagccggagcataccaatcgatatcgccatcccagtaatctgagttatttgtatcaggagtgccaccacctacaatttcagcaatctcacccaacttacgctgttcccaagggtcagtaaaaccagcgaaacgaatcgcaggaactttctcctgttcagtcatcattcgccccctaacaaggtcttcaactcggcaataccagccatgtcgaactcattgccagttagctgatcaagcatattgccaagttctgcctcagcttgctcgatttgctcgcatacatcggagtaggtagtcgaatatttgtcgttcagcgcattcaccgatgcaatcaactcatcaacagccgtctgaggaagctcctcaagcttgcgctgcaatggttccacccacttggcagcaagcaagtcagcagcttgttcaccgctcagtccttcaataacggtccgagtcttctcatcaagcgctgagcggagattcttaacgttctttttgacttcacgctcctcatcaaacaaccgttgcgcattcacaagggcacggtcaaaatcagtctcaggatccttcccaatcgatttcaccgctttcttcaactcagtggcaacgaaagaatctccatcctcactgacagcatcggtcgaattcttgtcgtcttcatccagattttcaagaatgtcagcgatctcgctgctaatctcagtcaatcgggattcatatgtgccgatttctgcaaggtcagcactcagcagtttttcttgtacaaggtcgaacggcagaatatgtccggcccagccgtccggcacttcgacatccttgccgcctttcttcttgacgaccatgttggcatcaactttgcgaacggcgtcatgtccctcgctctgtatggtctcaaggtcgttggcgatggtcttctgccagctgtcatcaagcacctgatatgccgtataggcatctacgagtggtacgtcggccaaacgatgcagcaggtcatttgccagaacttcctcctcggcggcaatgctcacgttgacggcattaccgaccagttcgccacgtagatatgagggataatcggtgaaaacctcacgataacgctggatataggcactcacaccagaatcagcattcaccgcctcacgaacatcttgcacagcgagcttagccgaatgaccattctcctccgcgaagagacgttggcgcaatcccggaaacacattccaatacttgttgagcgcatcgatgtcctgcttggggataccgccaaacatagtggaatacacgtcccaactttcggcggtttcggaggaatccacatatcgaggaatgttgaggttgtaatcgttctgccgaatctcgtcaatgctgaccaaacgactgaacttatcgacatcacgattctccgacaccgcatccacgatgcgtttgatatcgctcgcacgcagcttgttgttcttaccgtccttagcgaaatacttggaggcatccacaacaagcacatggtcatcgttgcggtgcttgcgcagcaccatcacgatagtgggaatgcccgtgccaaagaagatgttcgctggcagtccgatgatggcctgaatatggtggttctccactagattccggcgaatagtgccctcttcaccaccacggaacagcacgccgtgcggcaacacgatggtcataatgccgtcgtcgcgcagatggtagagatcgtgcagcaagaaggcataatcagccttggacttgggagcgatgccatattcgaagcggatatcttcacccggttccggcggctcccagttctgggagtaaggaggattcgaaaccacggcatctacaaacagcggctcataggtctcgtccttggtctcgtcggtatcgaaccacggccagtcactctttaatgtgtcaccgttgcgggtcacgatattgtccggcagtataccgcgcatgacgaggttcatgcgtgtgaggttgtaggtattctccttgagttcctgcgcataatatttgatgtcattcggattgccattgcggcgggccacagcttgaccaatatgaatcaacaacgagcccgagccacttgtggggtcataaatgttgatttcttcacgaccagcaagatgccaggccactatttcgctcatgagctgagaaacttcgctcggcgtgtagaactcaccggccttcttacccgcattggaagcgaagttgctaatcagatattcgtaaatgaagccgagggtatcgtaatcctgccggctgtccatcggaatgtccttgatgaggtagatgaggtcgcgagcggccttgctacggcttttctcatcggtaccgagtttggatagaccagtctgcaacgtgtcgaagatgccggcgaacacacgcttgcgggctggatcgatgttgcgttcaaaagcggaaagcgcatcacgtacgtcggcgatggtgaaatcgctttggctggcaatccatgtggagaacaggttgtcgtaggagataaagtagccgcacagatcacgtacgtactgcacggtctcggcatcattctcatccaagcccttgagatcttcatctccccagtcttcagcacgaagacgcgcaatttccgtctctgaaaggaacttatagaagataaagcccaggatatagtctttgtattcattcgcctcgatcttggaacgcatcttgttggcggattcccagattttggcggcaagctgctgcttattcattcatatgctccttgtgccctaagctctttcattactcttcatcaacgtattcattgaaaacgtcactgtccacggctttgatttcgtaaatcttccgcgtgctgacaccgaatccatgttcaatcatcagttgcgcaagcttatgcccatcaataagaatgatgtgctgcctcttcgcataggtaatcgccttttccgtgaatcttgcagtggtgacaaacagccctttgcctccgcgcccagtaatagcacctacgaatgcttgaatatctggtctgccaacggttttatcttcggcataacgtttggcctgaacataaatcagatcaaaaccaagcttgtcttccatgatgattccatctatgccttcgtcccccgagattggcgtcatctggcttgcggagtcgaaagctccataccccattttcgccatcagatcaagaacaaaccgttcaaacgcaatcggagagagcttgagcacctctgagagcaagtcatcggcaagccgcatgttgattgatgagaatgcacggtcaagtgcctcatctggagtttcctcggacgaataagcttcgcttttcttctccaggccgccatcgaccgtcgtatgtgtcgaagaatcaccattcagattcttgaaagaccggaatgactcataacgttccagataatcattatctatctgcgcacccgaagcaagggcctctttgccgggtctcgttatgcgatatgtaccacgtttgggactttctatgagtccggctttcttaaggtacgttctagcccaactaatgcggccattgaggacacgcgaacggccgctaggtagcagacggctgcgttcttcttctgtcactgcaaactcatcagcaagtaacgttagcatctcaccagatgcatgaatcttgccatcagcgaggatgcgaagcaccggaacgaaaaactcgtcatatctgggaattgtcattgtccgccttcgttccgttacagtcgtttatcaatgatacggcaaacatcacggaaatacgcctccgcttgggaacagcgtaagttgggtgagattgctgaaattgtaggtggtggcactcctgatacaaataactcagattactgggatggcgatatcgattggtatgctccggctgaactgggcaatgacatatatgcggaaagcagtgcacgcaaaatcactcgggcaggactcgaaagctgctctgctaagatgttgccggctgacaagacgattcttttcaccagccgtgcaggtatcgggaataccgcaatactgcggcattccgcatgcacgaatcaggggttccaatcccttgtaataaacgatgccaatgtttattttgtctattcgatgagtgcgagaatcaagaaatgggcagaagaaaaagcttcgggatctacattcttggagatatcgggtaggcaactcgcggacatgaccgtcagtcttccctcctctgtcgaacagcagttcatcggtgctttcttctcccgccttgacgacctcatcacccttcatcagcgtaagcgtctgtggtttgctaaataagggtggatagggctctcatcacgatgtcaacgtctttgttctccaattcacggatgacatgcagatatgtttcctgcgttgtgttcatgcttgcatgccccagtctcttggacacgctcgcaattgaaacgccagcaaacagcagcaatgaggcatgggtatgtctcaagccgtgaatcgagatcacgggtactccggcttgtttgcaatgccgggccagaatatcgtttgcggtcgagttgtacaccttaccgttcacgaagataggcttgtcgtcaggcaagttcttcagcaggacggacaattgcatgatgagttgccaatcaagttgtactttacgcaccgaagaagcattttttgttggaacaaagccacctccgttcttgtaattccaagtcttattgacagacaaagtctggtggacgaaatcaaagtcatcaggagtaagacccaatgcttcggagaaacgtaaaccggtttttgccaccagcaatatcagccagtcccagttaggtatcgggccaagcttcaagtcagcaaggacagcatgaagttcgaattggttaagatatttcgtcttcttttgtctcggctgcttccctttgatgattgcttttcgagtgggatctctttgaattaggccctcatcaacagcatcaagaatggcccctttcagttggtgatgaaaatccatcgttgtttgatgttcatgatgttcggcgtatccattgatgagtttctgataactcacacgatcgaactcagaaagcttaagatcagggataagctttctcagccacgcctgtgtgagtttgtatttcttcatcgtcacctcccgaatcgcgccttccttgtagacgtcgacccattgcgagtagtaatcgcagaatgacatttcttcgtttattgtgtttatgaccacacggggctcctttgccgaatagatagacgcttacgctgatgaagggtgatgaggtcatcaagacgggagaagaaagttccgattgcctgctgttcagccatatttggtatgtcaacaggatatggctcaatgtgcttgttattgatctgcggaatggtcgaagtatctgcgatccgataaaggccggtctgattgatgaacagccataggaaatcagcatctacgcccctgggctccagagccatcatgttcgtgtcaatataggcagttttccccagaactctaaccttattgccaagtattgctgctcctcttttcgcaaaaatgatactgcctttgcggataggtttaactgctgtgttggcgtctaccctctgcgcagaatcaaattgaaaatgagaagattcattcagatcatcaactttgacataaagaaaatttcccgcagaaaatgcgctgggtggagctccagcaccaattgacacaatctctcccaacttacgctgttcccaagcgggcatcggcactagatgaagcagggtagacgggatacgagtggctggccgaacatacgcaatacatctaccgacgacttggacactaccatttccgctgttagctacacttatcgcgataagtgtagctaacgacgattggagcgacaccttacaagccatgagaggtataaccgttcccttctattttgaaaaacttgaataagttagattttttcaaaatagggatgcgtcgaaaagacgcataaacgcacgaaaaatgcgggcatccgacatgcagtgttcattgaatcactgtatatcggatgcccgcaatcgtttcaagccgattgaagagcctcagctcagcatcagcatcacgccttaacaacctctacggccagctcggcaccttctttcacctcgaaggaggtagccagcgtctcgtgggcgatcagatccttgaactgctcgaccttggccacgtcgtcagcaggcacggtcagcaccagggcgatacggtccgcgatgtccagatcggcagccttacgtgcgtcctgcacagaacgaattacgtcgcgggcgtagccttcagccagcaggtcgtcatccagcgcggtgtcgaggatcacgaagccaccggtcggcagagcggcggagaccgaagcggcggccacggtggcgttctcctcctccacacggttgatcagctcgtactcgccttcgaccagcgcaaggtcgccggacggcgtggagaccaccggcgcaccggacgcagcatcgacatgccagtcgccggacttggaggccttgatggcgaactgcacctgcttgccgaggcgcggacccgccgcacgggcattcacacgcagctcgtgaacaatcttcagaccgtgggcggaggcatcctgcagcgtcgagaactcaatattcttgatattaagttcagacttcagcaactcgtcgtatgccttgacggcgtccacgttctcgaccaccacggtgagcttggaaagcggctggcgcacgcggatcttggcggccttgcgcagggacagggtgccggaaacaacctcgcgcaccttctccatcgcatccaccagggccgggtcgtcgaccagcacgcggccgagttcggtgtcttcaccggtcttctcgtccgccacgaacggccaatcggccaggtgcacggattcaccgccggtcaggccgcgccacacggactcggcttccatcggggccagcggcgcaagcacgcgcatgaacgcttcaagcacggtgtacagcgtgttgaacgcggacgcatcctcgttccagaagcggtcacgggtgttgcggatgtaccagttggtgagcacgtcgatgaagtcggagaccgcatcgcaggcgtcggaaatcgcgaactcgttcagcgacttctcggcggccagcaccaggcggcgggtacgggccagcaggtagcggtccatctccggcagaccggcgacctcgtccgcgcgcagctggcgggcgtcgaatccggccccgccgttggccgcgttggcgtacaaggtgaagaagtagtaggagctccacaccggcaacatgacctggcgcacggtgtcgcggatgccatcggcggtgacgatcaggttgccgccgcgcagaatcggcgaagacataaggaaccagcgcatggcgtcggaaccgtacttgtcaaacacgccgttcacgtccggatagttgcgcaagtgcttagacatcttctggccgtcggagccgagcacgatgccgtggcagatcacgttcttgaacgctgggcggtcgaacagggcggtcgccatgacgtgcagcaggtagaaccagccgcgggtctggccgatgtattccacgatatagtcggccgggaagtgctgctcgaacttctccttgttctcgaacgggtagtggaactgcgcgaacgacatggaaccggactcgaaccagcaatcgagcacatcggaaatacggtgcatgtgcgacttgccggtcgggtcgtccgggttgacgcggaccaggttgtcgatccacggacggtgcatgttgatgttgccgtccttgtcgcgcgggtagtcaccgaagtcggccttgagctcttcgagagaaccgtaaacgtccacacgcgggtacttcggatcgtcactcacccacaccggaatcggggaaccccagaagcggttgcgggagatggaccagtcgcgcgcgttggcgagccacttgccgaactggccgtccttgacgttgccagggatccagttgatttgctggttcaattccagtagacgcggcttgatcttggtcacggacacgaaccaggaggagaccggcttgtagatcagcggggtggcgcaacgccagcagtgcgggtaggagtgcacgtagctcttctcctggaagaggatcgcgcggcgctcttccggaatctcggcgagcgggccgtcgccggcgcgcaggttgcgcaggatcggcaggttggcgtcgaacacgaaatcgccctcgtagtcggggcactgcgcggtgaagcggcagccatcgtcgagcacgtcggtgctcttgatgcccttggcgttcagcgtgttcatatcgtcttcaccgtagggggcctggtgaaccagaccggtaccttcgacggtgtcgacgtagtcggcggtgaagatcgtgtagccgttcgggccgggcacatggccttcggattcggcctcgtcgcccgcgaagtacgggaagaccgggtagtagcggcggccttccagctcggagcccttgagttcgcgcacgacctcgtagttctcgccgagttccttctcgtagtgcggcagcaggtccttgccgaggtagaacttcttgccagcgaacttgccttcggtcgggcggacctcgacgtagtcgatgtcggcgccgaccacgatggcgaagttggtgggcacggtccacggggtggtggtccagaagacggcgtaggcgtcgtcctcatcgcgcatcttcacggccacggacacggtggtgtcctggcggtcctggtacacgtcggcgtccatgcgcagctcgtgcgcactcaacggcgtgcggtccttcgggcagtacggcagcacgcggtagccctggtaggccaggcccttgtcgtagagctgcttgaaggcccacatcacggattccatgtacgggatgttcagggtcttgtagccgtgctcgaagtccacccaacgggcctgacgatgcacgtagttctgccattcgttggtgtacttcagcacggaagcgcggcaggcgtcgttgaacttgtcgatgcccatcttctcgatctggtcaaccgagtcgatgccgagttccttctgcgcctcaagctcggcgggcaggccgtgggtatcccagccgaacacgcggttgaccttgcggcccttcatggtctggtagcgcgggatcacgtccttggcgtagccggtcagcaggtggccgtagtgcggcagaccgttcgcaaaaggcgggccatcgaagaacacgaattcgttctggctgtggtcgccggaagggttgcgttcaacggacttctggaaggtgtcgtccttgtcccagtagtcaagaacggtctcctccatgtcggggaagctggggttcggcgcgacgtgcgcggtctcgccgccctcgttcgccttgggatatacgttttcgctcaccgtaaatctcctgttagtactgtgcactggtcctacaggagcgtcattgatggcgattgccgggcgccgacgtgtgccggctgggttcacgaatgtcacgcaccgaaccgtggggccgatcgcgtcaatcgcctcgcagccggaactgactgtgttccgcccggaacagccctgtctgccgttcctgcctacgaggacgatgacgggcgctggtatgcgctccgcaccgcggtaccacctcgcttatcgcaccggttgcgccgctccgaactgttgcactcggagccgcgagcctgcgcgaccgcttgtgttcggctgtctcgggccgatcccgtcggttctactgggcgattgccgccgttcttccgaagactccccgctgataacggatcactgcctcacaacggtgcatatcgtaacacgccacgcggtcaaatcgccgcccacggccacggcaccgtcaggagcccgatttagattgggaccggccaccacggaccgagaaaggattgtcggacaatgacgtatgatttcacgtccatcatgaacaggcatggcatggattcgatcgcggtcgacggactgggcaccgacccgggattcgcgccggacccgccacgcgagggtttcgacgtcatccccatgtgggtggcggacatgaacttcccgaccgtgcccacgatcccgcaggccatcatcgaacgggcgaagcatcccgcctacgggtacttctcccccaccgacgactattacagctccatcatcgactggcagtccacgcgcaacggggtcaccggattgacccgggaggcgatcggctacgagaacggggtcctgggcggtgtgatcagtacgctgaccgcgttcgccgcccccggcgacggcgtgctgctgcacagcccgacctacatcgggttcacccggagcatcgaaaacaacggctaccgcatcgtccacagtccgctcacgctggacgagcgcggcgtatggcgcatggattacgaggatatggacaggaagctcaaggagcatcacatccacgtggccgtgttctgcagccctcacaatccttgcgggcgcgtgtgggaacgttgggaaatcgagaaggccatggaagtgtacaaggccaacgattgcgtggtcatttccgacgagatttggtccgatttgactctggggaaccaccagcacatccccacccaatcggtcagcgaggacgcacgcaacaggaccgtggcgttctacgcgcccagcaagaccttcaatctcgccggactggtgggaagctaccacatcatctacaatcccacactccgggaccgcatcgtggccaaaagctcgaaatgccactacaacgacatgaacgtgctttccatgcacgcgctgatcggcgcctaccggcccgaaggccatgagtggctcgacgaactgaaggcggtgctcaccggcaacgtcgattacgcctacgactacatcaccaagcatttccaaggagtgagtctggccaaaccggaaggcacctacatgctgctgctcgactgcgagcagtggtgcgaacgccacggcctgagcctgcccgagttggagaaacgcggctgggatgtgggcgtcgcatggcaggacggcgacatgttccaggccccctacagcatccgcgtcaatctcgcattgcccttgagccgcgtcaaggaggccatgcgccgccttgaccaatacgtattcaacgcgtaaacggcatgcatccgcgattgcggtgtcctggaaagacgaatgccgtcaacgaggttggtgcccgttggcggcattcgtcatacgttggccgaaccgggcgaaacccaagttgccaagttgccgtgcgctatgaggtggatgccgccagcggacgtgtacatctgaccgcccgatatgccggtgccaccgatgcgccgacgctgccggcattcggattggaatggacgcttcccaagcagtacgagaacctgcgcttctacgcccttggccccgaggagacctatcgcgaccgtctgcacggtggcaagctcggcattttcgagcgcaccgcggccgaagacaatgcaccgtatctggtgccgcaggagaccggcaaccatgaagacgtgcgttgggccgaagtgcttgacgcccaaggacacggcatgcgtatcagccaggccggcagcgaacatttcgcggcgagcctgttgccgtacagctcgctcatgctggaagaggcgacccaccagaacgagttgccgccggtccgccacacgttcctgcgcttgttggccgcgcaaatgggcgtgggcggcgacgattcatggggcgcgcccgtccatgagcagtaccagctgcccgccgatcgcgcctacacgctcgacgtgaatctggaactgttctaacagcgataaagaagctccctccacagagggagcttctttatcgcacagagggaacttctttatcgtgctggtacgaaactgtcacgcactactagggtggtggagatgaaggtgtggtggtgcagcgtgcgccgactggagatgacctcggcaagcatcgtaatcgcagtatcggccagctcattctgatcgatatcgtaactggtcaatgtcggcgaagtgtactgggtgatggcctggttattgatactgatcacactggtatcgcgaggcaccagcactcccgcagcagtaaacgcctgcagtacgccgactgcaatcgtgtccgcagccacgatgaacgcatccggcatgtcatctcgatgatcgttagccgctttctcccctagagtgcgcccggtgtccacagtgaacgcgccttgcgcgtaaatcaggccttccgcatccagccccaaacgctcggtccaattgcggaatgcggttaatcggctgtcttccgggtattcgtgcaaacccatcgtgaagccagtaccgccgatatagccgatgcgtcgtttgcccgaggacaccaacacatccaatgcgtccaaaatggtttggcttaaatccggttgtaccgaatcgaacaggctgggcgcaggattgatgtcgatgaatacgccatagggcaataccagatggagtttcaacagtttatccgaagagagtacggacggtccgatggaaatgaagccgtcgaaatcaccggcgttggcaatcagatcgtcgatatgggaaaacgacgtgagttccatgtgctgggctctggcattgtcgccgagcacggaccgcagttcatcgaaataggcgtccgccagttcttcctcgcgggtggcgttgtcgagtacggccacacggcgtggcaatgcgatacggcgtgatccggtagcgtagccaagctgctcgctgacctcgatgatgcgacgtcgcgtctcctctttgacggacaatgtcgggtccccattgagcagccgggataccgtggcctgcgagaagcctgatttctgcgcgatttccttcatcgtgaccatagttgagccttccacgcctcagtacgtaacaatacgcagtatttcagtaaataactttactacatagtgtaactcacgtcatgcgggtatgacgccgtatggttgcagcatcgtcgatccgcagcgctgatgagaacgtgcatgtttcaggccctccgataattatcgggcaggcgggaatccccagaccgtggagtcaatgcgctggattttcccggacttgtcaaagacaacggtgatgtccggcgcagtaaaactgccggtcgaatccccgaatcggtacggatcactccagtcgataacggcatgcatcgtcacggtccgagttttcgcgtcataggactcattcgagtactcgatactgttatgcgcggccgtagtcccgcccagaccgccgccattgccttgatgcatttgctgacaatacttcgtaaaatccgcgccgagaacattcgacactgcatagcgcctaaatgaacgtgttaggtctgcaccaattcacggccggcaatactccacacttctcagtaatcaattcgtaccaaaccgctcacgaatctgagcggcagtaccataagaggcttgcgcaccgatcccagtcgcggcgtacgcggaaacgtatgaggccaactgcgcactgtccgccaacgcatgacccgaggcaagtccggccagaaccgtgcccataaaggcatctccgcacccggtagtgtcgatggcctcaaccgcaactggcgcaatacgatagatatcatcaccatcgatgactaccgacccatccccgccaagcgtaattaccgcctgattaaagccgaagtcatgcatctgccgcgccacatcagaccagtccagtccatcccaatcgtcatcgtcaggctcggcgatgtccagcagctgtgccatttcatgttcattgaccagcagaatgtccgaagcctcgataagttcagcgggtagttcagcaacgaatggcgaatcgttgagcaataccttgagcccggcatcatggcagaggcgagcgcatgccgtgaccgtttccatcggactctccaaacacagtcccagcacatcggcggcaaccaatgcgtcagatgactggcgcacatagtcgacagacacctcaccattggaaccagccgaatatacgatggtgttctcaccattcgcgtccacggtaattaccgtagtgccactgggacctgcaacggcagcgatatgcgaagtatccacaccagcatcgcgcaaatgctccagcagaaaagccgcattggcatcttccccgactgcaccaaacatccgcacctgcgctccaattcgcgcagccgccgatgcctgattcgctgatttgcctcccggcaataaggtcagcgggccaccgttgacggtctctcccggtttcggcaaccgctcagtaacgaccgtgtaatcaacattcattgatccgaccacggacacactgccgtgcaggtggtcgagcaagtcaagacatgatgctgacatgatgcatttcctttcggccttcttgtttcggcctgtcttctatgttctgcgcttgttctacgtttcagcaaaatcacgatggaaacacaatcgtgcgggtatgcgaatgcccggagtctgaagtcaaatcccgggcattgcacgtattcggggccaaatcgtctgcgcgattgatatgttctgctgacgactgacgcctagcggattgtgatggttatatcagcatcacgcacccatcggcaggaagattgccatggacaggatgaacatgacgattacgccagcgatcatcggcacactggtacggcgcacaatgtcgattgggctcttcttgatggagccggcgacgatcatcaccacagcggagaccggcgagacagcgcgcagcagattgccagcgagacccatcgggatggacacagcgagcacattgataccagcagcagcggccagcggaaccatgagcggaaccatcgcgaagaacagtgcggtaccggaaccggagagtagcacgatgagcgcagtgaggccgacaaggataagcggcagcacgaagcccataccagagccggacaggccggtcattgcgttctgcagttcggtgatcagaccaatggacttaagaccaacgacgaacacagaagcagcgaccaacagtgccacaatcggcattgcgccacccatgcccttgaagaaggactcggtgccagcgagggtttccttgcccttgcgagtgcggatgagctcgcagataatggcgatcacgaaggagagaatggaagcgagttcaacactcaggtcgatctttgcgccggtggtggaagtgatggcgaacacgatgagaagcatgatgatcggcagcagcggcaaaatcgcatacacagtgcggtagagagcgctaccttcgacagccttaacctcagccaggtcaacatcaccgtcggtcaaatccgagccagcgcgcttgtccatgaacttctgccagaagtagtgtgccagtgccatgacgagcaaggtcgggatggaaacgagcacgtgataacggaagacgtaatcgctggcggtcaggccggagaacatgtcggtcttagcgagttcagcggcgatggcaacattgtcggagccaagcggggtcggcataatcgttgcagtagtggcaatgactgcagctgcgctcagcaggctcataccagcttggcgaagcaccgggtacagcgttgccataaggatgatagccaggttggaagcactcggaatgaccagagacaacaggttgcccaacaagaaggtaatcggcacgagtatatacggggacttgatgtgcgcaatcggcttggcgagcacacttaccgtgacttcattggctccgatatgggacatgtagccggtgtagccaccaaggatgaggatgatgaagccagcagaagtgagcgtgctcacgaactgatcgcctacaaccttgaacggatcaagccaagtgacaccactggaaacgaagtcggtgaatgagatgtccttgcccatcagcaatgcgatgtacatcagcacaatgccgatgaggaacagggaaatcttgatgtccattttcttcacgagcataaagcccacaatgccaaccgcggcaattgccacgaggtacataatcaccagttccatcggtctggtcctttctttgttctcttattctctgttgttgaattcacgaatactgatgcgctcaggggcgccggtgttagcggcgtcgaagagacaagggactatgcacaatgggcgatgccgtccatgaaccagtcgcagaatcgatctgcgtgaacgccggtggtgacggtggcattcggttcgcgcttaaggtagcccttaagatcaacgaccgtacaccctgcagtgagttcgccagcgatttctacgtccacaaatgccttagtcatgtcgaataggtcaggctccagcaagcatgcgactgcgcaagcgtcatacattttgagaccggtgccgaagctgcgcttgcggtagcgctggaacaggtcatgagccatcagaccgaccttgcccatatccttaagctgagcggttttctccggcggaatcacagttcccaagccggcgtccagtgtggccatagtaatgtcaagaccagaagtgagcacaatcttggcggcttcagggtcaacgaaaatattgaattcggccataacacccttgttgccgcgagtgaccgaaccacccatgagcacaatgcgctcaatacgcgacttgacttccggaaaagtttttagcaacagtgcgatgttggtcagcggaccgattggcatgacggtgacgggttcagcagaagccatgatctcgtcgtgcattgcttcgacagcatgcttatccagcagaagttcagttttgggctcagggaaatcgaatccctccataccggttttaccgtggacatcgcttgcatcatcaagctgacggatcagcggttcagcagcgccacgagcgaccggtacatccttaccgtagtaggccatcagcttgagcgcgttcgtcgttgtcgcttcaatgctgacattgccagcaaccgtagtaatcagccgcacgtcgaagcgcgggttgaacactgccagtgcgatggcgacggcgtcatcgatgccggggtcagtgtcgataatcagagggatctgcttcattgcttgttcggttcctttcgtggtgtgttgatatacgtgttatgcgtagtgctcggcgagccgattacttgattccgcttgtggcggtggattcagctgcgctgagcggaacgggatcaacgaattggactaatccgctgccataacccggtgccggccggcgcaggaacccatgctcttcgtagaacgattccttgccaggtgttgccatcaggccaatgtacgcatggttgcagcagtgttctcgaatgcgtgtgataagtgcgcgcagcaccgccgtaccgactccatccccttggtattgcggtaataccacgagatctttgatgaagaatgcgatacgtccatcgccgaccacacgaccaattccggccacctgaccatcaacgtaggcaaccacggaatacagcccaccatccagcgccatacgcgcgtcttcgcggtcgtaatggtagaaacccacagcgtcgcgaacgctgacgtacagttcggctgtcagcgcgtcttgctgaatcgatatgcacattgcccgctcacctcctctgtgagtttcctccaaaccgatcatcgttgatcatcgccattgataaaacgtttaatcaactaatgaaaattatgatataaccttttaccaatgttgtcaacgatgtcggcacgtcagcactgttcagcgcataaacccagccttcatgcacctgataaacgctgcaatatcagggaacacgccacataggagccccaaccgaatcacgcagtacaaacgatgacgggacatagcgcgattcaccacgactgcaatcattatttataatcatgtcgagcaacatatccacgccctggcgacccatatcctcagcttgctgcgaaataatcgcgacttgcggagtcagcagacggaatacggcaatgtcatcgaatgaaatcactgacatttcactaccaatatcaatgccgcggtcatgcagcaaaccaatcatcgtgatcatgtcaggcgagtaagcgcaaataatcgccgtaacacctgctcttacaagttcatttagtcctgcttcgcgcgaaacatatgtagaatcacagtcgacaaccgccgcagttccctcccccaactgcgtcacctgtgccacagcagaacggaatgccgcttcacgctcatttatattggacgagcccagtgacgagtgtgacacaaatccaatgtgacgatgccctaagcgcacaagttcggcaaccgcctcgcaaacacctgggtatgggtcggacactacgaatggcaccgaatttactcccgataccaaacgatccacgaacaccagtggtagctcgcgcgcgataagcgactgcataccaggcgaattgacaccttgcggcaccacgatcgcaccatcaatacgttgcccaagcagattgtcaataaacgcatcctggcgttccactgtttctgctgaagtaccaatcagcgtggaatagccccgggcatacaactcatcctccattgacgagaccaaatcggcgaaatacggattgcgcaaatcaggaaccagcaagccaactgttttggtatccgacgaacgcatggaacgagcacgttgatcgggcacataccccatttcctcaacagttttcagcaccaactgtcgcgtatcgctagaaaagcggcctttattgtgaagtatttgggagacggcagcagccgacacaccggcacgttgagcgacatccttcaacgtcacgaacgccatagtcccctccttgcggccgatacatcgtcaaaacaacaattcaaatgtacccttttcaccgccaatattcgtaatcctgcgctaacacacggctctcaacatagaaaaccgcacctcaaccaccggatgagaattgcttcaacccgataatcgaggtgcggtttttacaggcgtaccggctactccagttccactgcaccggtgtacagctggtagtactcgcccttttgcgcgatcagctcgtcatgcgaaccacgctcgatgatgttgccgtggtcgagcaccatgatcacatcggaattgcgcacggtggacaggcggtgggcgatgacgaagaccgtacggcccttcatcaggttatccatgccggcctgcacgacctcctcggtacgggtatcgatggaggacgtggcctcgtcaaggatcagcgcgggcggatcggccaccgccgcgcgagcgatggagatcagctggcgctggccctgggacaggccggaaccgtcgccttccagcaccgtgttgtatccctcgggcagcatacggatgaagctgtccgcattgaccagacgcgcggcctcgatgcattcctcatcggtggcgttcaggcggccgtaacggatgttgtccatcacggtgccggtgaacaggttcacgtcctgcagcacgatgcccaaagacctgcgcaggtcaggcttcttgatgccggccacggagatgccgtcgtacaggatctggccgtgctggatgtcgtagaaccggttgatgaggttggtcacggtggtcttgccggcaccggtggcgccgacgagcgcgatcttctggccgggcttggcgaaccaggtgatgtcgtgcagcaccggcttgtccgggttgtagccgaaggtcacgttggtgaagcgcacgtcgccgcgcagcagggtcagtcggccgtcgggcgaggtgatcgcctgctccttggccttcatcgccacctcgcgggccgagcccttgagcttttctgcggccttcagagacctcgtaccgtcgtcgccgacctcgcgcttccatgcccagtgaccggtctcgtggtcgacttcggtcatggtgcggccatcctcgccaagttccacgttcacgagcgtcacggtgcccttgtcttcctcgatgggctcatccatcagcttgaagatacgggaggcaccggcgagcgccatcatcaccatggtcagctgctgagagacctgaccaatcgggttgatgaacgagcgggatagggtcagcagggagacgagcgtgccgagggtgagcggcttgacgccggtcagaccgatgtcgttgacgccggccagcgagacggcggcgccgacgatggcaagcaggatgtagagcaggtagcccatgttgccgacgaccggcatggtgacgttgccccaggtgttcgcttcggcggacgcctcgaagagttcctcgttcttctcgtcgaaggtattctgggtggcgtcttcatggttgaagaccttgatgaccttctggccgttgacggattcctccacgaaggcgttcacgtcgccgatccactgctgctgcttgacaaagtagcggccggagcggctcacgatcttgcgcacgatgaagtagagcagaacggtgaacacgattacgaacgcggtgaatggaatggacagccacagcatggacagcagcgccgcgaccgcggagataatcgaggagaacatctgcgggaacgactgcgagatggcctggcgcagcgtatcggtgtcgttggtgtagtggctcatgatgtcgccgtgctcgtggctgtcgaagtagcggatcggcagcttctgctggtgggcgaacatgtcgtcacgaatcttcttgagcgtgccctgctcgacggtgacgatcagccactgccacagccaggacgccacgatgccggccacatacaggcacgccatcaggctgatggcccgcagcagcggggcccagtcggggttcgactcccccaccatcggcaggatgtacgtgtcgatgagcgactggaggaacagcgcggaaccggcctgcgcggcggcaccgaccaagatgcacaccacgatggcgatgacgcgccacttgtactggaagatgtagctgaagatgcgcttgatggtgccaggctcggttttgcccatggcgggcttgcggttcttgaaactctggtcgttgctcatcgtgcttctccttccttggtatcggctgcattggtatcagctgcgctggtatcggccgtgggcatgggcactgtcaccgtcacggtttcggacggctcagcggtagatgactcagcagcctgttcggcagcggccagttcttcgggctgggcctggttcttggtctgggattcgtagatggaacggtattcatcgcaggtgacgagcagttcgtcgtgtgtgccggacgccatgatgcggccggaatccatcaccagaatcatgtcggattcctgcacggaggccacgcgctgggcgatgatgatcttcgtggtgtccggaatctcgttgtggaacgcggaacggatcagcttgtccgtcttggtatcgacggcgctggtcgaatcgtcgagaatcagaatcttcggcttcttcagcagcgcacgggcgatgcacaggcgctggcgctgtccgccggacacattggtaccgccctgctcgatgtacgtgtcgtacttatcggggaattcctgaacgaatccatcggcctgcgcgagctgcgcggcatggcgaatctcttcatcggtggcgttcgggttgccccacctgaggttttcggcaatagtgccggagaacagcacgttcttctgcaacaccatggccacctgatcgcgcagcgcctcgagatcgtagtcgcgtacatccacgccgccgaccttcagcgaaccggagctcacgtcgtacagtcgcggcacgagctgtaccagagacgactttgccgaaccagtaccgccgacaatgccgacggtcatgccggagcggatcttcaggttgatgtcgtcaagcacgggcttttcggaactgtcggagtagcggaaggtgacatggtcgaattcgatggagccgtcggccatgtcagtcaccggctgtgccgggttctgcaccgtgctttcctcctgcagcacctggcagatacgctcggcagaagcctgagaaataatcaccatgacgaagatcatggacagcatcatcatggccataaggatctgcatggcgtaggtgaccagtgcggtcaggtcgccggtggtcaggcccacggcggggttgttgccggaggcgacgatctgctgcgcgcccatccatgcgatgaggatcatcgaaccgtagatgcagatcatcatcagcgggctgttgaagctcatgatgcgctcagccttggtgaagtccttgaagatgcgctgggagatgcggccgaacttggagacctcgaaggattcgcggttataggacttgaccacgcggatgccctgcaggttctcgtcgaccacgttgttcaacgcatcgtaggtgtgaaacacgcgctcgaacaccggatgcacgagcacggccagaccgcacaggccgatggccagaatcgggatgcaggccaggaacaccatggaaatcgacggggagatacggaacgagaacagccaggatacgaccaccataatcggggcacgcacgcccagacgaatgatcatcatgtaggcgttctgcaggttcgtcacgtcggtggtcagtcgggtcacgatcgaaccggtggagaaccggtcaatattggtgaagctgaagccctgcaccttctcgaactggtccttgcgcaggttcttggcgaagcccgcgccggccacggccgcgtactttccggacaggaagccggcacccagcgaaaccatcgagcacaccagcagaatcacgccgaacttgacggtggccggcatgctgccaccggtgataccctcatcgatcagcgaagccatgatggtcgggatcaggatctccaggatgccttcgaccgtcacgaacaccggagccaggatgctggctttcttgtattcacgaatcgactggcccaacgtgcgcagtacatgtttgggcttgtccggttcgacggctttgcgcgcctgcgcgattgcctctgcggtatcgctcattcgttctcctccttcgtgttagcaacctctgctccgtcttgatcgggagccatcaccacaggtgactgagggagtgtttgatgttcaaattcgcgttgtgcgcgctcgatgttcgcacgcatgcgtgcgacgtagtcgcgcagagcggccttctcgccatcggagaagccgccgaccagcaaccgttcgacccgatcgccgttcgccttgagatcggcgacgatcgcgtccgccttgtcggtcaggacgatgcgcttgcagcgcgcgtcatgctccaccgattcacgggcgatcaggcccttcttctccatcagggccagcacacgcgaggcggtggaccgggtgatgcagaatttctgttcgatggtgtgctggtagatctcacgaccgcggttgcgcgccaggaacatgatgatatgcgcgttgccgccggtggtttccctagcggtttgcggcatgctctcgcccaaatagcggtcgacggctttggttaccgcacgcatttcgatgctgagaatatgctgatccattgtcctccgtaccatgcgggggccgtgtgcgtttgtaccttcaccccacattgttgtatacgcaacaattcatgataaagagacccatatacaacagttgcacatacaacaatcggcgtgttgcagtatccccaaacaactgttgagcctaaacaaagctggctcccctcaggagagggaagccagctgtattacgccgtgcgattgcctcgcttcagcccttacttcgcgagcttggcgtactcgtcaaccatgaactgggcgatcttcttgccgccttcgcccagcagggtgggcagcgaattgatcggcatggggttgaggaacatgcgcatcatggcgttgtcgggcagcttcgtcagctcgccggcctcgccggcggcggccacggcggccacgatcttggcgccgaacggatcggcctcccactcgccgtaggtggaccattcggtgagcggctgggtcttgccgtcgccatcgagggccacggcaacggtgtcggcaatgtcgcgggagctcacgcccacttcgatggcatattcgccggcctccacgtgccagtcgttgtatttttcggaccagtaggcgaacgcgcgctcgtcgaggtcgatggtcacggtcttggattcgccggccttgaggaacaccttggtgaagcccttgagctcgtgcttcgggcgggccacgtcggccttgcccggagccacgtacacctgcacggtttcggcggcatccacatcggaggtgttggtcacggtggcggtcacggtggcggtgttcgcgccggtcttggcggcggcgacgtcatcgatctcgaatgtggcgtagctcaggccgtagccgaacgggtagtccacagccttgccgtaggtgtcgtagtagcgatagccgacgaacacgccctcgccgtagtcgacgtggccttcctcgcccggccagttcagcatgctcgggtcatcgttgatgcccagcggaatcgactgggcgagcttgccggacgggctgacctggccgaagatcacatcggcgagcgccgggccaccggactggccgagcagccaggattcgaggatgcccttggcgttcttggcccacggggccacggagaccacggagccgttggacagcacgaccacgacgttctggttcgcggcggcgacctgttcgagcagggcgatctgcttggcgggcatgtcgagggtgtcgcggtcgaagccctcgattcaaagcatccggcgcacgactatttcgcggaccgcgagcgccgcagcgtgacgaacgcgctcaacatcaactggtcagtacccgacggcgcgaacgtggagcacgtgcttcaggcgggcctgtcgatgatggacggcattcagctgcgctggctgcgctctcccggtcgcgatctcaacgccatgtgggtcgactgcgaggatgtgctgttcccctcccccttatgggacggataccgctgacccttccgtaaatcgcgcgtctcgcacatcacctccgccaccgcgtcatcaatcaccgtcatcccgaaccatcaccccatccatcccgcatgccagacatgccgcagatcccaagggtcgaggcgcgtgtcgtccatcacggcggcgtccccgtcacccataccgggcgcgggaggcgcgagacggtcaaactcgccgcgaccgccgcgcagtcgatagctccagtagacctgaccggcggagacgttccacgcgtcgagctgcatggcggcgacgcggaggtagacggcgcggcggcgcgcggcgggcgacgggacgccgtccccggcgtcgcccgcgcgcgaaccgacgtcaccggatgcgccgtctccaacatccgcaccgccgtcaccgaacgcaccatatccgtcgaacgcaccaccagacgcatcaacggacgcgacctcaccttgcgccccgcactcccccatgcgcgccgcaagcccgttcgccacgcaccactcccccaccatgaccggcgtaaagcgcgcggcacggcggatgcggcgcgcgccccacgccgcgaacagccggtaccagcgcataagccatgcgtccggcagtatgcggaacagtacctcgggccgttccgacatgacgagatacgcgtgcgtgtcgatgatgacgccgcgcatgccctcacgtacgaaccagccgcgccagcggttcaggcggaatccgtcatggaacacgatgaccggcccgtcgcccagcaccgggcgcagccatcggtatgccgcccgatagaaccgtttgaggaagcgcatcggaacgtggccgctcccccgcgcctcccccggatccttcgcccgggagctcgacggcgacatgagataagtgagacggtcgaccggctcgttgagcacttcgatgccgtacaacgcagggcggtcgcggtaacgtcgcgcgagacgctcgagcacgtccagtgcgaacgcaacctgccgcggcgtcgtatgccagcggaccacgccggtcaggccgccattgtcgaacccgttctgcgacccgggcacggtgtgcaggtcgatgagcaccttaagcccggccctctccgcccagtcgaacgcacggtcgaggtattcgacgcatccgggatgcccgggcacgtcaccgaagatgaaaaacggcacggggatgcgcacaaggttcagcccgtgcgcggagatggcgcggaagtcgtcctcggtgatgtacgtgtcgcggtgacggcgcagcaggcgctccagttcggccgggtccgtggaccggtgcagccagatctcgtcctcctcgccgctcgcacggaacaggccgggcgtcatccaccgttccaataccagccagccgccgaggttcactccgttgattcgcccatcgtcttccggcatggccctctcatcagtattccgcatcattgctccgttccgcacaaacgacaccgcccgctccagcatacgaccggagcgggcggaaacatatgaggcccacacgaaaccgattcacacgggaccggctcacgcgagagcatctcacgcagagcagattcacgcgacggtgaaggtggtgcgcttgaggtcgtcgcggcgcgacgagtggccgatgagcagctcgaactcgccgggttcgacgatgcggttcgcatcggcgtcggcgatggtgcagtcgcagaccggaatgtcgaacacgacggtcgcggtctcgcccggttcgagcgtgacgcggcggaacgccttgagttcgcggtcggcccagctgtatgaggtgacgacgtcgcccacgtacgcctgcacgacctcggtgcccgcgcggcgccccgtgttggtgagggcgatctcggcgtgcacggtgtcggtctgcgcgaacgtgccgtccgcgttcgaggccccgccgacgatcgtcggctcaccgtacgcgaacgtcgtgtagccttcgccctcgccgaacgcgaacgccgggtcctgcgtaaggtcggcgtagcggttgccgtgctggccgcggatctggttgtagtagaccggcagctggcccgcgtggcacgggaaggtgatcgggagcctgccggacgggttcacctcgccgaggatgatctcggcgatggcctgtccgccctccatgcccgggttcggcgcccacaggatggatccggcgccggacttcggatcgttgcaacggccggcgagcacgccggaatcgcccacgatggaacgcggcagcacctgtggcttggagctcaccagcacggtgaccatcggcttgccggtctcgcgggagacgtcggcgagtgcgtcgagcagcgcgttctggccgccgagcagttcaagcgtggcggtggaacaggtctcgccgaccagctgcaccacatcgcccacgacggcgacgatgaggtcggcctcgcgcgcggcggcgacggcctcgtcgagcagggcccggtcaacgggcgcgctcactccgatcttcgggcgcggctggccgtccgggtagaactcaccctccgggtcgggcacgaggtcgatgacgttggcaccgcgggcgtaggtaacctcgcatccgtcgccggcgagcgcacggaagccgtcgagcacggtggtgatcatgccgcgcggatgaccgtcgggcatccagccgacttggccggagctgccggcccagtcgccgagctggttctgggcgtcgtcggcgagcgggccgaccacggcgatgcgcttgcgcgcgggcgcgtcaccggagccggggatcgcttcggccggcgccgcgtcgaacggcagtccgccgtcgttgcgcagcagggcaacggcctcgcgagcgagctcgaggttcacgcggcggtgatcctcggagccgatgacggccttgatgcgcttctcgtccggcagacgcgggtcctcgaacaggccgaggcggaacttgagcgcaaggatgcgcgcgacagcctcgtcgatgagcgactcgtcgagcagaccggtgtgcacggcctcgatggcgccgtcgtagaaccccggcgtggtcatgaccagatcgttgccggccttgaccgcgtcggcggcggcgtgcacgtagtcgggcttgaccttctgctcccatacggaacggcccacgttgtcccagtcggtgatgagggtgccgttgtacttccatgcgccgcgcagcttgtcggtgagcagccacttgttgaacgtgaccggtacgccttcgatggactcgtagccgagcatgaacgtgccgcagccctccttggcgatgcgttcgaacggcggcaggaaccaggattcaagcttgcggtggctcaggtccgcttcggaggcgtcacggccgccctgggtctcggagtatccggcgaagtgcttggcgcaggcgaggatcgcgtccttcggcagcgtctcgccggcctgggcaccgccctgatagcccttgaccatggcggaggccatctcaccgatgagcatggggtcctcgccgaaggtctcgtccacgcgaccccagcgggtgtcgcgcgcgatgcacagcaccggggagaacgtccagtgcacgccggtcgaggagacttcttcggcggtggcacggccggccgcttcgacggccttcgggtcccagctcaacgccatgccgagctgggaggggaagatcgtggcgccgggccagaaggagtagccgtggatgcagtcatcgccgatgacgagtgggatgccgagacgggtcttggtgttcacggtttcgacggcgcgcggcaggtcctcggggctggtgtgcaggatggagccgacgtgcttgttcacgatgagctcgtcgaggtcgccaccgcgggcgtcgagctgcatcatctggccgaccttctcttcgagggtcatgcgggagagcaggtcggcgatgcgctcggaggcgggcaggtcggggttcttgtagggcagcgtttcgactgtggtttccggtgtggtcgcggtcatggttgtgttcgcctttctgggttccgtgcggtcactcgatgacgaaggtgttgaaggagcgcggggcgagcgtggccttgaagccacgggaggcgtcggccgggtcggcgaactcgaacgggcgttcgtcctccagcgcgttctgggtcacgaccacgatggtgccgtccgggttgcggaaggcgatggccatggagttgaagtggctggtggtgccgagcaccttcgcgccggggcgcacgtacttggagaagtggcgcatcacgtagtattcggggttgtggcgcacctcgtgcgtgtcggcggtgatggtgaacagggagttctggcgcgaccccggccagccgaccaccgaccggggttttcgtaatcctagaccaaacacacccggcacctggcaggccgcggccggtacgacaagggccagaacgcccgccaggacgctccggcccgaatcacggccggcatggaacccggtcagcgctggaacacgtcggggtgcttcggatctccgggaatatcgtcgagcaggccctcgaggccgaggaactcacgccagaagtcgagcggctggccatacgggttggattcgcggccgtgcgcctggatgttcgccttggcttcgaacacgtcttcctcggtgagcccgtcgaagtagctttcgagacggatgcggttggacggcacgtagtacagggacgcgatgatctcggtgagccgttcgacgcgttcgattggcagcgaatcccagtggcggaactcgatgaagttcttgagacgcacgtcgttgaaatgcgtggagatgatgtggttgatttcgtacgcgttgagctcgcggtccgggtagacctcgccagcgttctcacggaaggcggcgcgatgcagctccttgcggctcagccccgattccaccgcttcgggcgtgtgcgtcaggtcggcgaacatcagcggcgtggacagcacgtcacgcgcgtagtcctcccagccgaaacgctggtcgaacaggccgggggtcacgttggtgcgctggaagtcgaggtagtcccacatgcgctggcgcagcagcggatacgggttgagacggccctcgaagtagggggtgttgcggaagaaccatgcgagaatcggcccgatggcggtgccgacgcgcatcttatcgatcgaatccttctcgtcgacatagtcgatgctcacctgggtggaggcggagcagcgcatcatgcacggaccgaactggccgacgcggccaaggaagtcggtcatcgcgtcatagcggcctttcggattgaccggcacgtcgacgaaactcgacttcggctggtatccgtagttgacgaaacggaagcccagctcctcgaggatcgggtccgcctcacaccggaagtcggcgtacaggccgttgaggtcgcccggctcatgaagcacgccgatggaagcctccacctggccgcccggttcgagcgacaccgcaacgccttcgcgcgcgagtccgaccagatggccgttctcccagtattccttgctttcgtcataatacggagcgagccgtttgaggaacgcttcgatgccgttcggctcgtagtagcttacggccgtgtcgtcggcgtcatgcaccggcagatgctcaatctcgacacctaaaccaccggtgccgcgcttggagcgccccgcctcgaagaacttcagaaggctctcgacatgcttcgggttcggctcggcgagcaggtgcgcatagctgattctgggagtgaccatgaacggtatcgtaggcgagtcgcgcgacgcgcgtcgccgcgcgcccgcgaatcggctatatctttttccgataaccggcacgtcgccggacatccgccatatcacgccgcaacgccgcaccgcgccgtcgcaccacaccgcgccgccacgcccccatcaccgcacgccacgcctccgcaacgccgcgccacaccgtacggctttgccgttatgcgcgatgtcggatacactcattgatttgtaaaccttgtttacagaaacgtccggcagagaggccggaccacaccatcaacccaccatcaacccacggcgaacagccggaataaaagaaaaacaacagaaaacaacagaacacggaaaacagcaacaacccatacaaaacaccggcaaccataagcacgtcggaagcacaccggaacgcacaccgaagcgcaccggcgaccgctccggttccacaccgaaaccacgccgaaggccataccggaaacggaccgaggacatatcggacacgcccggcaccccaccggcacgccggtgcgccacaatcggaaggaaggaaagcggcatgacatcccgtcagggcagacaagccatagccgcgacggccgcaatgggcgtggccgtcgcgctggcgttgccgaccgctgcgttcgcgcagtcagcaacgcaaggaaaggagaccgctacgaccacgtcatcaggcaccacctactacgtgtcgtcggcacacggcgacgacgccaacgcgggcaccagcgaaaacgcgccctggaagtccctgaccaaggtcaacgacatcgcctcggacctcggtccgggcgattcggtgctgctggaatacggctccgaattcaacgaccagtacctgcacatcaaggacaccgccggcaacgccgacgcgccgatcacgatctccgcctacggcgacgccgacgaaggcaagccggtcatcgcgtcgaacggcgtcaaaggcagccagtgggagcaggactaccgtgccaacgtcggcaaccacaagaacaagggcaccgtctcaaccacgctgctactcaaggacgtgtcgtacatcaccgtctccaacctggagatcaccaacgacgacgcggacgtctacgatccgatcgacacgtggaagtggaccgacacccctgattccgacggcacaaaactcgaccgcagcgcctcgcgcatggaccgcaccggcgtggccggcatcgccgagaacggcgcgacgatgagcaacgtgacgctcgacaacctttacatccacgacgtggacggcaacatctacaacaagcacatggccaacggcggcatctacttcatggcccactaccccatggagaacacgagcgccgaaaccgacgtctggctcagggagcacgtctcacgcttcgaccacgtcaccatcagaaacagcaccgtcaaggacgtggatcgttggggcatcgccgtcggctacaccgcctacctcaactacatcgacgcgaactacggcgacggctccatcgacgacgccctcatcgcgaagtacggttccaccaacgtgcgcatcgagaacaactacgtcaagggcgccggcggcgacgccatcaccctgatgtactgcgaccgcccggtcatcgaacacaatgtgggcgacagcgtctcgaagcacatcaacacgcaggactacacgcagcccggctcctacggcggacgcgtggcggccggcatctggccgtggcgttgcaaggatccagtgttccagtacaacgagatgtacaacaacctcaacgccgagcacggcaacggcgacggccaggcgtgggacgccgactacggcgacggcacgctgtaccagtacaactactcgtacggcaacagcttcgcctcgctgatgatctgcaactggtacgcggttaacaccacgttccgatacaatatctcgcagaacgaccgtcagggcgtgttcgacctgccgtcgaacggccccggcaaccacatctacaacaacaccgtctacgtggacgccgacagccaggtgctgactaagcgttccaactcgcagtccctgttcgagaacaacatcttcatcaacgcgaccaacacgaagaagacggagacctggaaccgcggcagccagaacggcggccagacgtacgacaacaacatgtacgtcaactacgcgaacaagcccacctccgacgccaacgccatcgaggccgacgacgtgtccgcagtgcttgcgggcgccggttcggctccgacatccgccctcaagagcggcgccgagcatgcgcgcaccggcgagaaagccgcgttcgacggctaccgtccggtcgcgggctcgaaggcgatcaacgccggcaaggtcgtctccgacctcaacgactacgcggtggagaacgacttcctcggcaacgcagtcaagggcaggcccgatctgggcgccgtggaaagcgacgtggtgtccgtcacgatggcctcctccaagtacgagaccggaaccgaaaccgattccgggaccggtgacaagaccaaggtcatccacgtgaccttcaccgacaagaacccggtgaccgtcaaggaactgctctccaacgtgtccgccgacaagggcgtggacaaggccgtgtaccgagtcgccgacgccaagtccggcaagtccgccgacgccaggtccgccgagtccgaaccgaacatgctcgaccgcctgctctccctgctcccaggctccgaccggaacgccaaggacgacgagacgaagctcgccgactccgaaccggtccgcgatggcgacatcctgcgcttctccgccgaaggcacggacgagaccgacgagtacacgatccgccagcgcatcacgtgggattgggtcgcggactacgagcaaggcgtcgccgacttcgactggaaggcgcagcgccgcacgtccgccggcggcgagtggaccaccatctccgcatacgacggctcgtggccgaacaccgtgtacgaccagtactacggtgtcggcgtcaacggcaccctcgccgaactctccggcgaccgcaagcagacgcacggcctgctgatcgacaagcccggcgacggcctgcccacggccatggcgtggaaggcgccggagtccggcaccgtcatgctgtcgctcaagacgttcgccgacaagatcgctgaaccgtacctgcgtcagaacgcggacaacgccggcaagaaggtcacattgtcgctgatgcgcaacgacgagacgctctgttcggccgacgacctgtccgtctatcagaagtcctccgaacagttcgcgcagtgcctcgccgagcacggttcgatcgacgtgcaggaaggcgactggatccgcatcgtcgccgacgccgagaccggagtcaaggcgccgtcgctgcacatcagcccggtcatcacatatgaggacaaggcgcccgccgcgccgaagcagaacgtgcgctacgacgtctcgtacgccgcgacggacgccgtcgtcggcacgcagtcggccgtcgccgccgcgttcaccgcggacggcggcgaggccgacgcgccggacggcgtcgcgttcgccttcaaggacggcggcgatgagggcgaggcctcgcccgtcatcgacgcgtccaccggcgccgtcaccttcacgcccgccgccggacagtacggcgcgaccgtcacccgcaccgtcgtcgtcacgtacgcggacggttcgagcgacgagacgaccgtcacgttccgtgtcgcgcaatcgcacgcgcagcgtctcaacgtgctgtacccgaccgtgcgcggcgacgccggcacggacctgaagcgcacgccgaagttcacgctgaaggcggacggcgcggccgcgtctgtgccggaaggcacgacgttcgcgctcggcgcgaacgcgccggccggcgcgagtgtcgacatggcgaacggcacggtcacgctgaacagcagggtcggcggcaccgtcaccgtgcccgtcacggtgacgttcgccgacgacggcgccagcgtctcctccaccgcccgcttcgaggtgaccgcgcccgccgcgctcggctcgtccgagttggagaccgcgactgtcgacggtgtgaacgtcgtctacgcgccgttctccgccgacagtccgatgaccgtcgcgcagctgctcgccaaggtgacggccgaaccgtccggcgccgataagggcgtgtaccgtgacggcgtgcggttggaggccggcgcagaactcgccgagaacgacgtgctccgcttctccgcgaaaggttccaccgtgtccgacgactacgtggtgaagtcgaagaccacgtgggattgggtgaacgacttccaggtgcgcgtgcagggtccgatctggtacgggcagcgtcagaccgaggccgacggcgtgtggtcggatatcgccgacttcgacgcgacgtatccgaactggatgtacgagacctactacggtccgggcgtggactacgcgaaccacagcctgcccaccgaccgctccgccatccatggcctgatcagcgattcgcccgcgtccgctggtggctccgccatggcgtggaaggcgccgaaggccggcacggtgaaggtgtccatccgcgaggacgagccgtacctgcgccaggacggcagcaacggcaaggcgttgacgcttcgtctcatgcacgacgacaaggtggtgtgcttcgccgacctgaccgtctccaagcagcgttccgaggagttcgccaactgcgtcgccgacaagggcgagatcgcggtcgaggcgggcgattggatccgcgtcaccgcgacgtccgcgtccggcatgaacaagccgtccgcgcacatctccccggtcatcgcctacatggccgcctccacgccgggccccgaacccgttccggtggacaagtccacgctgaaggccacggtcgaggaggctctgggattggccgagtcggactacacggatgagtcgtgggccgcgctcgtcgccgcgcgcgacgccgcgcagaccgtgctggacgacgatgccgccaccgccgaacaggtcgagaccgcgcagaacgcactgcgtgacgccatcgacggattggagaagaagccggtcgatccggacccgaacccgaaaccggatccgaaccccgatcccgatccgacgcccgacccggaccccgaccccggccccgacaccaagccgggtgacggttccggcaacggttccggcaacggttccggcacgggcaacggttccggttccggcaacggttccaccggttccggcagcgacggcgcgaccaccggcggcaagctgaccgccaccggcgccgacgtggccggcgcggccgcgatggtcgcgctgaccgcggccgccggcatcggactggccgccgcggcccgtcgccgcaggtgaccgatgccacgtaggcaccggttcgccgccgccatcgccgcagtcgcggtggcggcggtcctgctcgtcacattgaccgtcgccgtcgtcacgcacggcgacggcgccttcgcgcccgcaggcacgcctgcgggcgcgggcgcatccgccggcatcggctccgataccggctccaatgcaagcgaggattccgacatgttccccaccatcgtcttcggcgacaccgtcatcgaacgcaaggagtacgtcgcggcgctcaaggcgcaacacggcgcggcgcggctgtactttcggcagacgtacggcgtcgacccggccgaggacggctgggataaggcgcacgacggcgaggtcccgtgccgttggctcgcgagccgtgccatcgacgaactgcgacgtcggcacgccgcgtacctcatcggcgtggatctcgggcaggtggccgacgactcctatgcgagcatcgtcgcgcgcatggaggccgtgaacagcggcaacgcggaactgaaatcggacggcggcatcgtctacggccgtaccggcttcgacatcgacagctacctgagctacgaactgtccgcgttgaagaacgcctatacgggcgacgagtcgaaccccggcatgagcctgtccgacgacgaggtgcgacgctactacgacgagcacgactggacaaaggacggcgtcgacgggaaggctccgctggacgaggtgcgcggcaacgtgaaggcgcagatgcggtcggaacgttacgacgagctcgtgagccagcgcgccgaagcgatcgacgtgaccgacctgccatgggacgcgctgtaccggttcacggcaggcaggctcgggtaggacgggtgtgaccggtgccggccgaaaagcaccagaacgaataaggcgggtgtcccgttccatacggaatgggacacccgccttgtcgtaggccgcagaccggtttgcccggtctgcgccggtctggtgccgaccgggcgtcggttggacgtcggtttgaggtcagtcggcggcagtgaagccctgcggctcgtcgccgtcggcgaacttcgccttgtgcgccttcttcgcggccgcgatcatcagcttgatgcggttgagctggttcgcctcggaggcgcccggatcgtagtcgatggacacgatgttggcctccgggtgcaggcggcggatcttgccgaacatgccgcggccggtcacatggttcggcaggcaggcgaacggctgcgcgcagatcacgttcgggcatccctgttcgataagctcgaggatctcggcggtgagcagccagccttcgccggcctgcacgccgatcgacgtgacctcggcagccttctcgacgagttcgggcatcggatcgtcttgcttgaacttgccgtgagaggtggcgatggccgccttgatcggcgcgttgtagcggtcgaggctccaacgcatgagcgcgtacaacgtcttgttgccgccggtgccgagatacttctcgttccagtcggtgatgtacgggcgcgtggtcatgaactccatgatgccgggcaccacggcctcgcaatcctgcgattcgatgacgtcgacgacatggttgttcgcatccggctggtatttgacgaggatctcgccgaccacgccgacgcgcaccttgcgcggcacgtccttcaacggcagagcgtcgaagctcttcacgatctctcgggcgagcacggggtacggcaggtagcggcgcttgagccacggggtcttcgcggccgtcttcgagaagccgtggtgttcgagcgcctcgcgcacgatcacgtcccactgctcgtacaggcggttcgccgcgcccttctccacctcgtacgggcgcacgcggtacaggcacttcatgagcaggtcgccgaggatcagcgccttgacggtgcggtgcagcagcgcgggcgtcaccttgaagcccggattgtcctccaggccctgcgtggagatcgcgatgaccgggatctgcgggtaacccgcgtcgatcagggccttgcggatcaggccgaagtagttggtggctcggcacatgccgccggtctgcgtaatcgcgagacacaccttgtctggatcgtatttgccttcgagaatcgcgtcgatgagctgtccgatgaccatgatggccggatagcaggcgtcgttgttcacgtatttgaggccagtctccacgtcttcgcgcgaggcgtgcttgaggatgtcgaacttgtagccgccggagcggatcaccgattcgacgagggagaagtggatcgggctcatctgcggggcgacgatcgtgtagtccttcttcatgtccttgacgaacttctcacggtgcgcgtaacgggacatggtcgcgttgttgtggccggacttcgacttcgcggacttcgacttggcgttcgcggcatcgttcgtggtgccgtcgccgagcgcggcgagacgcacatcggcgatgtcgcgcttcgcggcgcgcttggacgcgtcgcgcatcgccttggtgagcttcgggttcgcggccatcgtcgcgtcgagcaggacctgacggcccggcgtgggcgccttggagccggtcttgcggaatccggtggacttcggcgcgttcgcgggggcggcggcgtcgctgccggcatcggccgcgtccacgggcctgtcggcggccttaaccttcgcttcggcggcggcgacggcggcctgcgcttcggcgagcgcggcctgcgcggtggcgagatcggattcggcctgctcctgcgccttgcgggcggcggcctgcgcggcggcgtgagccgcgttgcgcggggcgtcggactcggcggaaccggactcgtcggacgtggcgagcgcggccttggccatgcgcgccttgttcgcctcgcgttcctcgacggcggccttgagcgagcgcaggcggatcttcgccgcgccgaggttggagacctcgtcgatcttgagcagcgtgtacacgtccgccttgtcggccagaatctcggccacctgatcggtggtgatggcgtcgagaccgcagccgaaggagttgagctgcacgagttcgaggcccggatacgaggacacgaagtgtgcggccgcgtacagacgggagtggtaggcccactggttggtgacgcgcaacggcatcttggtgactgtgcggtcgcctacgtggcggaatcctgcggcgttcttggaacgcgggtcggcttcgccttccgaaaggaattcggtgaggttgagcttctcccccggctgcagttcgcagatggaatcctcggaaagtaccaccatgcccagcgagcagatggtttcggggatgccgtggttgatttcggggtcgatgtggtaggggcggccggcgagtacgatgccgcggcagttgtgctccttcatgtaggcgagcgcggtcaagccctcctgctgcacgtcgtgcttgaagaccttgtcttcggcgtaggcggccttgacagcagtttcggcctcttcgcggctgacgctcgcccatgcgaactcctcgacgatacggtcgaccatgagctcgtggttggcgaggttgaagtacgggtgcatgtagcgcacgtcggggtcacgcagttcgggcatgttcgcgccgacgacgagcggatagttggcgacgaccgggcagttgtagtggttgtccgtgttgggcacgaggttgtcctcgtaactgacgcacgggtagaagatcgtcttcatgcccttgttgagaagccatttgatgtggccgtgcacgagcttggccgggtagcagatgttctcggaggcgatcgattcgatgccggtttcgaacagttcgtggctggaacggccggagatcatcaccttgaaaccgagcgaggtgagcagcgtgaaccagaacgggtagttctcgtacatgttgagcgcgcgcggaatgccaatctcgcctcgggtggcgttcttgtcggtgaggcggcggtaggcgaagcagcgcttgtacttgtagtcgtacaggttcggacggtcggagcgtttcttcttggcatcgccgccgcgttcgcaacggttgccggtcacgaagcgggagccgtcggagaacgtggtgatggtgagcttgcagtggttctggcacagcttgcacacgtcgcgttcggtggtcatcgacatttcgttgagggcttcgccggtgaggattgacgagacggtgtggcgcacgccgtcgacgacgatttcgccggcgtgcgcggcggcgttcggctcgtcgccggcggcggactcctcagccgccgccgcgtcgacggaacgcccgtccgcgccgacgtgcgcgttgtcgtcgtccgcgatgtcctcgtagtgcatgcgggcggtgagggccgcgccgaacgcgcccatgaggccggcgatgttcggtcgggtgacttcgcgttcggtgagcagttcgaacgcgcgcagcacggcgtcgttgaggaacgtgccgccctgaaccacgacggtgtcgccgagttcgccggagtcgcgcagtttgatgaccttgtacagggcgttgcgcacgaccgaatagcacaggccggcggcgatgtcctcgatggacgcgccttccttctgtgcctgcttgacggacgagttcatgaacacggtgcagcgcgagcccaagtccaccgggtgggtggaggcgagcgccttttgcgtgaactcctggatggtcaggcccatggacatggcgaaggtctgcaggaacgagccgcagccggaggagcatgcctcgttgacggcgattgaatcgataacgccatcggtgatggccaagtacttcatatcctggccgccgatgtcgatgacggcggtgacgccggggctgaccatttcggcgccacgatagtgggccatggtctccaccacgccctcgtccaagtgcaggccggtggtgatgaggccttcgccgtatccggtggcgcaggagcgtgcgatccacgcgccttcgggcagctcagactgaatcttcttgacgatgttgatggcggcggtcagcgggctgccttcgttgttggcgtagctggaccagacgatttcacggtcgtcgttgacgagcgtggccttaatggtggtggaaccagcgtcgatgcccaggaagtgcgggccgtgcgcgccttcaagggtgccgatgtggatgtgttccttgtggtggcgcttgttgaagtcctcgcgatcggcctcggtgggaaacagcggcggcatggtaggcgtgttggaaggcaggttcttcagctcgtccagacgcttcaggatatcgtcgcacgtgtgggcctcgaaataattgccctgatcgtcggagtctacgtcggcctgcaatgccgaaccgtaggccacgtacaagtgggcgtcggtcggcacgatgaattcgtcgaccttgccctcaagcgcgcgctggaatgcggcgcgcagttcagacatgaagaacaatggaccgccgaggaagatgacggtgccgtgaatcgggcgtccggaagccagaccagcgatggtctgcgtggccactgcagtaaagatggaggcggccaaatcgggcttggccgcaccatcgttgatgagcggctgcaaatcggttttggcgaacacaccacaacgagaagcgatcggatacaggttctcgtagctcttggccatctcgttaaggcctgcggcgtcagtgtcaagcagcgtggacatctggtcaatgaacgcgccggtaccacctgcgcacgaaccgttcatgcgttgttcgggcgtgggtttcaggtaggtgattttggcgtcctcgccgccgagctcgatgatgacatcggcctgcgggtattccttgtcgattgcctcggtttcggcgatgacctcctgaatgaaaggcacatgcagattgtcagcaagcgccagaccgccggaaccggtgatagacaggcgaatcggttcgtcgccgcgtccgaggtccacaagcttcttgtggatgtcgaccaacaggccggccacggtggcacgcacgttggcgtggtggcgtcggtaatcggagaagagggtgtctcccagggaatcggactgatcaagcaccacggccttgacggtggtggaaccgatgtccaatcccacacgcaggggcttcgggtgtgaagcgggctttacgctcgcgtcagtggcgatgtcaaccatgtgttcctcttaattccgacttccgggagtgcacgctttgaggcatcatgaaccgtttcgggacggctggcagataccctgcggacggcttcgcccggctacttcttatggaatattagtccgaccacctgcccaacatggcacgaggcgaggcgatttcgctcacgggaaggccttttcccaacagttccaacgatattgctgagtgcggcattccagaactgctactacgaggcctgttggccttcgccggcttcgcggtctttcaaatagatttcggggatatctcgttcttgatcgtggagcttggcccagatgaccggttcgccggcttccagagacttgggcacatcgaggatgcgctggtttctggagccgcggaattgcagcagcgagtccttctggtctctgaggtagcggccgtcgacgagaatgtcgatgagatgtagcaattcaagcttgtctggggtttctccggggcgcatgagttcttcccatgtgtagccggtccacgaccagatatctttggtatgaccgaattcctggcggatacgttgtgcgagcggcaccagcacgggagtgttgaggaatggctcgccgccaaggaacgtaatgccttgcacccatggggctttcagatcttcgatgattttgtcttcaagtttttgcgtgtattcgtggccggcttggaaatcccagatggaggcgttgaagcagtcgacgcagtggaaggggcaaccggagacgtaaagggagttgcgcacgccttctccgtcggtgacaatgaaggttttgtagtcggcgatcatccgcttggacatgcgccggccatcccattgaccggctttcggatcgttggcaagaccgttggagggtacggaggggccacgcccggtctcgccggccgcaaagtcatggcgcttgggttcgggcttggtcgtatgcagctccggcatgattccctccttacggaaagcattagctcccgctggcgggagctgtccgtcatcagacggactgagggtggtcaacaccataaaggatgaccaccctcagtctcgcttacgctctacagctcccgtcagcgggagcaagtataaaccctacttggtctcttcgaaccactcgcgagtggttccgtcatccagcgtcacacgaccggtttcgccgctcatgtgcttgactcggtgggcaatctcctcgtgacggccgtgcaccatcgggcgctggaccgggctgccgagatagccgcaggtgcgcttggtgacgttgcacttgtccgggtcggagttaccgcactccgggcacttgaagccttcctcggtcggctcgaagtcgccctggaagccgcacacgaagcagtggtcgatcggggtgttggtgcccaggtagccgatgccgatgttgtaggcgtaatcccacacggcttcgagcgccttcgggttgtcctgcaggcacgggtactcgcagtagttgatgaagccgccggaagcgtagtacgggaagtccttctcgtagctgagcttctccatcggggtgggctgcaaccacaccgggtagtggaaggagttggtgtagaagtcgtggtcagtcacgcctccgatacggccgaacttttcacggtccatgcggttgaagcggtcggtcagggattcagccggagtggagtacacggaatagtggtaaccctccgctttgctccactgcttgcacagctcgttcatgcgcttgacgatggacagcgcgaactccttgccttccggatcccagccgtggtcgcgaatccagttcttgccgtagaagaccgcggtggtctcggcaaggccgatgtagccgagcgacacggtggcacgctcgttcttgaacagctggtccacgttgtcgttggcaccaagacgaccaaacgcaccgaagcggaacagggtcggggcgttgaccggggtggcttccttgcagcgcatgatgcggaactggagggcctgatgggcgacttccatacgctcgtcgaacagcttccagaagcgagccttgtcaccgtgggattcgatggcgatacgcggcacgttgacggtgaccacgccgaggttcatacggccgtcttcttcatccttgccggtctccgggttgatccaaccctgcaggaaggagcggcaacccatcggagccttgaaggagcctgtgatcttgacgatgttctcgtagaacaccacatccgggtacatgcgcttggtggcggactcgagggcgagctgcttcagatcgtagttcgggtcacccggatcggcgttcacgccgtgcttcacagtaaagacgagcttcgggaagatggcggtgtggtgttccttgccgaggccgcgaatacggttcagcaggattgcgcgctgcacttcacgagagaaccagtcggtgccgagaccaaagccgacagtcacgaacggggtctggccgttggacacacggttggagttgatctggtattccatggtctgcatagcatcatagatggccttgcgggtacgaatcttggcgaggatttcacgctcctgctcaagttcgtcaacgtcggtgtggaacggggtgtccatcggcagcggttcgcgggaaccgaaatgcagcttggcaggctcgttcttcttggcgctctcgacctgacgacgggcgaattcaaccggcatgccgtcggggatggtctcacgagcttcctcaaggaacttctcgtaatccttcttggcatactgggcaagatgctcgtcggcacggttggcggtctggccaccatactggctggaggccacgtccttcatgatctgggtaatctgggtggccgcaatggcgatggacttcggggaagccatcggagcgttgccaagagtgaagccattggccaacatgtcccagaagttcggcaaggagcagttggactgggcagtgaacggcgagtagtcggcatcgtggaagtgaatgtcgcccttcatgtgggcgttggacaccgccggcggcagcatgttgaacgcggcggccttggacacggcaccggccagcagatcacgctgggtggagtagacgttggaatccttgttcgcgttctcgtgaatcagggtcgggtcgtggttgatgaagcgagcaacggcctcgttgacatcagtggccttggcacgctgaatgtctttgtcgagacggtaattggtgtaggcgcgagccacatcgtacaggtgggcgtcaatgagggcgtgctccacgagattctggatgtcctcgatcttggcggggccggcgtaacgctccttgatttcgccttcgacttggttggcgaaaccacggatcatggcatcttcttcggggccgacttccttgttcaggtcaccgaaagcagacttgaccgcagagatgatgttgatggggtcgaagtcgaccacacgaccatcacgcttctcaacgagcacggtggaggccttggcggccaccttggtctcgttataggtgacggtttcctccagcacctgtgcgcccatcgggcacccctttcctgtaaggcgaacactctcctgagttccgcattttggccgcactcgacgtgggccacacgaaattatattgatgtcgttttcttgaacctctagaagaatacggcatccccacccctatatctagtgctcaacagtggtgtgtcgaactatttatagggtttttcggctattttccgccaaaatcacaagtgtgtgattagcgtaactgttttctgctcgcgtgtcgtacagcgagctcaccgacgactctcaaccgtcagcgcaacgcatatctcactcctcttcatagcacccgtttcttcgccataatgactcctttcttctgatgcaccagaccatctccatcatcggctgatacatcgcttcgtacggttcttgcattcatcatcacaccgttttcaggcgacggtaaatttttaccgtcatcaaccaacgcacttatagtggagtgcatgactactgcaatgggctacccatctaccggccgtccaccgaccgccgcttcactggcctcggctggctttgagccgggtcaaggcactttcgcgcccgatcggggcgccatcaatctgccgaatgagcctcgacctatcgatcagctgcctgcacgcgccgctgaaaccaccgcgcaaaatccatggccggtaagcgtgctgagccagaagttctacggtgccgtggaacgatggccgtccgcgtgggtcaccggccagatcacgcagatcaatacccgtcgcgccggctcggcctacatcacgctgcgcgacgacttcgaggatatcgccatggaagtcaatggcttcggcaggttcgcggccgcggccagccagttcgttcagggcgaccgcgtggtgattcacggcaaaccgaacctgtggatgaagcgcacttcgctgtcgttgcgcggggacacgattctcaaggtcggagccggtggcagcctcaaggccatgatcgacgaattgcgcaagcagcttaagggcgagggcctgttcgacgccgatcacaaactgcctctcccggagtttccgaagactattggcctgatttgcgcacctcaggcacgtgcggaaggcgatgtgatcaccaatgtgaaccttcgttggccttccgtaaccttcaaggtggtccatgtgcatgttcagggcgagcaatgcccggccgaggtggttcaggccattgcacaactcgatgccgacccgagcgtggatgtgatcatcgtggcccgtggcggcggctcgtttgaggatctcatcggtttctcggatgagcgtgtggttcgtgcggcgtatgcctgcaccacaccattaatctcctccatcgggcatgaggatgactggacattgctggatctggtcgccgatctgcgcgcctccacccctaccgatgcggccaagcgcgtggtgccggatgtgcgtgagcagtcacagctcatcgaaggtgccatcgaccgtatgcgactgcgggtccgttcgcgcgtggagaacgagattcgacttatcgagggatatgcgaaccgcccgagcctgacacagccgcacaccatgcttgagcctcatcagcgcttaattgacgactcgttgcaacggctcgatatcgggctgcgacgcatcgtggacgatgcccagctcaccgtcgagcgagctcacgcctcactgaccgcactcagcccgcaatccacgttgaaccgaggctatgcggtggtacagtccgccgatggccacgtactagacgatgcttcgcaggtaagccctggggatggcatcaccgtcaccttgaagaagggtgtcattaccgcaaccaccacatccgcaaccgcgtgacacgccatacgcagccacgcatatataccgtatatataaggagaacatcatgaccgaaaacgccacatccaccgacaagaacacccccgcctcgtccctgacggacaaggaacgcgagctcatcgcccagatgccatatgaggaggcgcgcgacaagctgattcaggctgtccaggcactggaaaccggcggcctcaatcttgaccagtcgatgcgtcaatgggagatcggcgaggccttggctaagcgcgcccagggtctgctcaacgacgtccgtgccaagctcgaccaagcacaagccgagcaagccgccaacgaagccaccgcaggcacgcagtccaacctcgactgagttgcctcccggcgcggcatcccgcggctcgcacctgagtccggactggactgagttctgcttcccggcatacgatagtggtgattaggccacattggcagcagtttatagaagggaaatcccatgtcaacgttgattcttgtattccatccgcatcttaaggacggctcgcgcgtgaacgcccgcctgctcgccgaactcgccgcacagggcgaggacgacatcatcgtgcgcgacgaatacgccgaatacccgaacttctccgtcaacgccgacacagagcacgagctgctggaggctgccgaccgcgtaatccttcagttcccgttctactggtactcctcccccgcgctactcaaggaatgggaagacgaggtcatcaccgccggctgggcctacgccggagcccatgcgttgaagggcaaggagctcaaactggtggtcaccactggttccgacgccgccaagtaccgcaaggacggcgagtacagccacaccatggaggagctgctaagcccgtttgaggtcgtggcgtacaaggtcggcatgaactatgctgagccgttcctggtgcagggcaccgccaccatcggcgatgcggagctggatcaggccgccgccgattatgtttcggcgattttggactgaataagctgaggccgggtgcaagtcgcacccggccttgttgtttcgcgggctagccgcggtctctcccagtcagcctgcggctgacagttccctcgtcagagagagcttattttttggatcagagggagttgatggttacttcttcaacggcacgtagatcacgtcgtcaatgagctcgcgatagtgctcaacgatttgcgcgcgacgggtcttcaggctcggggtcagcatgccgttggcctcggtgaattcgtctggcagaatctcgaacttacgaatcgactcggcgcgggaaacgccctcgttggcggcgttcaccgcacgctccacctcagcgtgaacgatggcgttcttggccagcgaggccagatcgggttccggtttggcgccctgggattccagccaattgttggcatccgccagatccagcgtgaccagagcggccacgaacggcttcttatcaccaataaccaagcactggttgaccacaggcgaggtcatcacggaagcctcaagcagacccggcgacacattcttgccaccagcggtgatgatgaggtctttcttacggccggtgatggagatgaagccatcttcggagatatcgcccagatcgccggtgtgcagccagccatcagtgatctgctgggcagtgaccccagggttgttgtggtagcccttgcacaccagcggtcctttgaccaccagctcgccgtcctcggcgatgcccgcagtgataccgcacatcggcatgccgatggtgccgatgcggttgtcctctggcaagctcacacacaccgggccgcaggtttcggtcatgccgtagccttccagcaccggcatgccgatgccgttgaagaagtgggaaagctcggagtccatcggagcgccgccggtgatggcgaagtcggcgttcggaccgaaaatcgtgcgaatcttcttgtacaccacctgctcgtagaaggcgtgggcgatgcgtccggtaatcggcagctgctcacccttctgctcggccttggaccattcgcgcgcgttctcggcggcgcgcatgaacatcttgccagcgaatccggtgccggcgcgctgggaggcggcattgtagaccttctcgtacacacgcggcacggcaagcagcagcgtggggccgaaggtctcgaagtccttgaccatcgtcttcatattggagctcaaggccagcgaaatcgtgccgccaaaactgaagaattccagaaatcgggcgaacacatggctcaggggcaggaacagcagcagacggcggttgggccatgcgccggcacgaggcatgtactgcagcgcggaaagcaccaggaaggcgaagttgcggtgggtcagttccacgcccttcggggtgcctgtagagccggatgtgtagacgatggtggcgcggtcgtcgccgtgggaggcttccttgtattcccagaattcggcgtcggtgacgctttcgccgtaggtcttgatggcgttcagaccgccggcctcgattacgaacacgttgcgcagggtgggcacctcatcgcgcacggattcgatcttgtcacgctgcccgtcatcttcggcgatggcgagcgtgactttggaatcgttgaaaatccagctgacctggctggcggagttggtctcgtacaccggcacggtgagcgcgccgatggacatgatcgccatatccagcgcggtccattcccagcgggtgtgcgagacgatggcgactgaatcgcccttgttgacgccaagtccgatcaggcccttggccagatcgatgaccatgtcacggaatacttgggcgctgtacgggtgccaagtgccatcatcgcccttgtattcgatcatggcactttcgggatcgcgcttggcgcggttatcgagcagatcgaacaggttgatgtcgctgtcaatcggctccttgacgggattggtgaactgcttgacgatacgagtatcgtttatggccttatcagcgatgttttcagtcatactccccatgtaactccacggatgctacaaaacatgccgcgaaacaatggattgtccagaccaaatggccccggcaatccgttatttcgggcaaaccaggtaaatctgtcgcaccgtacattcagcagattactcggcggagtcattggcctttttcagctcgtcgcgaatctcctgcaacgtggcgagagtctgctcttcaacgctaggcccctgttcttcagcgtcagcctcatcctgggcagcagtgagatcacgaagcttattaatcggcagaatcacgcagaaatacaccgccacgccaacaagcaggaagttaatcagcgcattaagaatcgcaccaaacgaaacggtcgagttgttgaacgtgatggtcagtagtccggaaagatccggtacgccgccgatcatgccgattaatgggctgatgagattgtctacgatggaattgaccacagcggtaacggcagagcccatcaccacacctaccgccatatcaatcattgatccgcgcgacaggaatttcttaaagccattcaacggacctttatcggtcaaagcaacaactttgcgagcggttcctcccgtggccttggcaaagtcggcggcaatattcatgggattgtggctattcataacggcactccttacaaaattcggacacttcacttgtatccgactggtttcccacgactccattatgccgcttgttggaatacccctataccactgcggcgttcccgtacatgactatgtacgagaacgccgccaaccctgcttgcagagaacctgttagagctgtttagaactgaatgtaatcgacttccgtatgttcgccggtttccaagtatttcgccacatcatcaggaccgacgaacaccagttcgaccgcttgcgcaatcatcagattgacacgatccattggcgtaaggttttcgaaatagccgtacaccgggattcccagcgcatgcgcatatccgatttcgaacatcgtgcccgggtcctcgtccataagattggcgaccacggctttagcagcattaatgccatggatatcgtccgcaaagcatccttcagggcctacttcttcgatctggctgacaaaccgcggcttgaacagtaccttgccatggtcttccaatatcttttccaaacgttccatacttgccgtttgttcaggatcaaagaacggaccggccacatagaagtcatactgtttgtcttcactcatggtctctagtcatagcgcagcaacgtcgaacgtcagccgttattttcactgtatggacaaggggtcgtattgtgaacattgctacgggataaccgtcaacgactacgtacgttgcccacgattggcgcatgccgccgctcttgcgccgtccgcactgccagcccgtcagccgcgattgacgatttgcatggcgcggccatcgtccatcaggtggaagccatgcttctggtagaacggtgcgtttttgctttcctcaggcatgacttccagcaagaagtagtcgcgatacttagccttgaccagttcaacgagatggctgccgatatgctgcccgtgatatgccggatctaccagcacccaatgcatataggccaccatttcggtatcgtcgagcacgcgaaccaagccgaccaaatggccgccatcccatgcgctgatcaccgtatccgaatgctgcaatgccttgaacaaccgttccggccactgcgccgattcccaacctaccgacttgaacagcgcctcaacctgctcaacagtaaaccgcttctcttccgtgtattcgatagccatggaccctcacgacaaccgtgaagccccacatgtctttgcatagtttcacacgacgggatgatggatagtggaacctatacgtttacacatgcctaatgcccatggctcatcaccgatgaatagaggctgagataccgtcatgtttccgaagccaagtgcccgagatcggattcgaaccgacgacacccgctttaggagagcggtgctctatccactgagctactcgggcaacgatgtttcattgtacacggccacacgcccagtcgcatcatgttcgcgtggcagcttgcgcaagccatccgacaacctgagcaagccacatggaggaacccgacatcaggtcatggcccggtctttcgtgccagtttggtgcgaactgctcttgcgcacggcgaaaagacactgaaagacaagccgtacacggtacagtggcaaatcgcacgaaaagcaaagtaacagtaaacaagccggaggaaagggcagcatggcaaaggcacggagtactaccacaggcgcaagcgtacgagctcgcgccgctgccaagccacgctctgccagagccacggcacgcccagtatccaagtctgccgtgaagccacacaaacggcatcgtctgcttggttttctcgccacgatgttcgcgcttcttgcccttgccggcgctgccgcccgcgcgctgcctgccgatttacaggaactgccatttgcgccgattgtggtatcggcaacgccatggttcacgttgcttggcttgattgccctgctgttggccatcgtgtcgcggcgtatccttgccgcactaatcgccatcgccgcaatcgcatgcaatggctattggcaatatccgttcttctactcgaccgatccactcccccaagccgcgcagaacgccgtggccgcagcctcccccaacaccagcgatgcctacgcgcgcgtcatgaccttcaatgtgtataaggggcaggccgacccgcaagccatcgtcgagctggttcgcgatcagcgcgtcgaagtgcttgctttgcaggagaccaccgaggatttcgtcaaaaaactcaatgaggctggtattgagcattatctgccgtatgcgcaggtctcatcgtctgacggcgtattcggtaacggcctctggtcggccacgccacttgccgatccgaccgacgatgacgtgaattccagcgcctcattcatgcccggcggcacggtggatatgggtggccagcagattcgattcgtatccgtgcacaccaccgctcccgtacccggctactggcggcagtggaagcgatcgctggatgagttgggtctgatgcgcgagcatacggatacacggtatattttcatgggcgatttcaacgccacttacgatcacacgccattccgtgattttcttggcgaccggttcgtggatgccgcacgtgaatccggacatgggtttacgttctcatggcccacgaaccgtgcggctgtgccaatgttcgccggtattgaccacgtggtgcttgatcagggcatgaaggccggacaatgcaaggtggtcaaagtcgagggctctgatcatgcggcattgttggctaccgtggcggttgggtgattcccctcaataggactagaaaccgaggcgggtgcggccgaattggtcgagccagcgcaaaatcgcgccttcacgcagcgcccacgggcagatctcgacttcctgaatattcagggccttcatgatctcgtcggccaccacgccgccgcccacaatctgcatcgtgcgttcaggcgtgatgccgggcaaagccacgcgctgctcaggcgcgatcgccgccaaacgaggaatccagtcttccaactgctcacgagtcataatccatgaatcttcgcggcccggcgcacgcatcaccgcaccgcacaggcgagccagcgagcggaaggtcttggaggtgccaactgcatgattcgggtgcttggattgcgggaaaaccttgaccatcggctccagaatcttgcgcacgttcttacgcacgtcttccaactcgtcgggcgtggccatgccggaaggcagaaattcagtggtgacgcggcccgcgccagccggggcggaaagcgctacggtcggctcttcgtcggagcccatcgccacttcgagcgaaccgccgccgatgtccagcaccagcagtcggccggcatcccaaccataccaacggcgggcggccaggaaggtcaggcgagcctcatccgtgccagacagcacagtgacgccctgaccaatcagttcctcgatcttgtgaatcactttgttgccgttcggcgcctcgcgcagggcggaggtggccataaccagcagctgggtgatttcgtattcctcggccagccgcatgcactgggacacggcttccagaatcgcctcgatgccggacttcttgattgagccgtcgtcctttaaatacttcatcaggcgcactgtggatttggtgctggcctcggggtcagggcgagcgccgggggcggcgtcgacgataagcatgtggatagtgttcgaaccgatatcaagcacaccaagtcgcgtggtatgcgaacgcagattgaccatgattcctattcctgaccttacctaacccgtgatggccgaacaacgggccgaccatcgcaatcagccagccgtgcgccaccatggcgagtcgttcggccggcaaccaacaccgtgaggccagccgaacatcacacaaactcgactactgtacaacaatcacaccggctgccgcgccgttcacagcgattcgacgaacgttccgagacgttccagcccctcggtcagggcctcacgtgaggcggcatagctcaggcgcacatgcgtatccgccgtggccgcgccgaagtcgcggccaggagtcagagccacatgggcttcatccagcgcgcgttcgcagaacgtccaggcatccagaccagtgcgggagatgtcgaagtaggcgtagaacgcgccattcggctccacctcaaccggcaaaccgatgcgcttgagcccgtcaatcacaatgcggcgacgggccagcaattcctgacgacgagcttcgcattccgccaagctttccggcgtgaagcaggcgagcgccgcatgttgcgtgggcgtgtgggcgcacaggtagtagttggtggccagatcgtcaaccgcttccagcacggtgggctcgtccggcagaatcgcccagccgaggcgccagccggtcatgccgaagaacttggagaagctgttgcatacgatggcatcggggtcgcaggccagcacggatttgacttcggtaccgtccggctcccggtcagccaagtcgaggtaggtttcgtccacgatgcgccatgcgccgcggctggcggccaacttgcacacctcgtccaatacgttgaagtcgatggtggtgccggtggggttggacggcgacgtgatcattacggccttggtcttgctcgtccagtactggctgcacaggtcggcggtcaggtggaagcgggtggcggccgaggtcggcacatcgatgacccggccttcaaacgaccgcacaagttcgcggttgcatgggtaggaggggtcggccacaatcacatcgtcaccggggtccacggtcagcgcggtggccaacagcagggcggccgaaccgccggcggtcacgcagatacgcttggggtcgatgtcaaggtcatgacgctcgcggtagaagtcggcgatggcctgacgcagttcaggtaggcccatggcggcggtgtacggcagggcccggccgtcgtactgttcgcgcatggcgtcgcgtacggcgggcggcgcgccgaaatcgggctcgccaaggcttaatttgatgacgctggtaccttgggcgatcatcttgtctgcttgttcgccgaataccatggcacggaagggattggcctcacgcgctcggcgggacatgactggagacgcggccggagattggggctgctgcgctgcttcgttttccatatttcggttctatccgcctcacgggacaaggtttcttcttctataatcactgtaggtcgattgagtgcaccaacccgcattcaaggaggaataatgagtcgattcaatggcaagcgcgccgagttcgaggccagcggcgaaaaaatcaacgtcgcgattctgggtgcgggccgcatagctcacaccatggccggcaccctgacccagatggctgaagattcactgtattcctcatggattcacccgtatgcggtagcggcccgtgatattacgcgcgcgcaggcttttgccgaccaatggcattttgacaaggcttatggatcgtatgaggagttggtggcggacccggatgtggatctggtgtatatcgccaccccgcacagtctgcacgccgaacaggcgatcctgtgtatgaaagccggcaagaacgtgctggtggagaagtcgttcaccgcgaacgccgggcaggcacgtgaggcgctggccgtggccgaggaaaccggcatgctgtgcacggaggccatctggacgcgctacatgcccagccgcaagctcatcaacgaagttatcgagtccggcgagatcggcgaggtgaaagcggcgagcgccaacctgtgctatccggtgtccggcaaggcacgtatgaccgatccggcctgtgccggtggcgcgctgctcgatgtgggcgtgtatccgctgaacttcctggatatggcggtcggcgccgaccatggccgtacacttgatcatttcgatacgtcgatggtgcccgccgaaaccggtgtggatgcgcagaattccaccacgttgtattacagcgacggcacgatggccgtgtccaccagttcgatgctggtttcctccgaccgcggcggctatgtgtggggcaccgagggttatctggtggtcaccaatatcaacaatcccgagtccatcgacatctatgacaacgcccacaagcccgtgcgcagcattgcggtgccgccgcagttgaccggttatgagtatgaggtggccgatgcggccaacgcgctgctggacggcaagatcgaatgcgaggcgatgccgcacgccgacaccatccgcatcatggagctgatggatgcgattcgtgaccgctggggcctgaagttcccgtttgaatcctgatttcagctcccctccagaggggagctgaaattattccgctgaatctgcatctccttcaacaatctgctcatacagccgtacgaggcgttcgtcgcgcacggctttcgttaattcgcactcccatacggtaattacgcgccagccagcggcctccagttcggctcgctgcgcgatgtctcgattgtgattgcgcagtagtttcgcctgccagaattccacgttcgatttcggcatcgaatgtttggaacatccttcatgcatgtgccagaaacagccgttgacaaacacgatggcgtggtatttcggcagtactacatccgggtgtccggggtaacgcttgtcgttcttgcggaatcgcaaccccttgcgaaacaggtagctgcgtaccagtacctcaattttggtgtctttgccacgaatatgcgacatcgtgtacgaacgggtaccccgctcatacttctccactggctgtttcttgcgattcacgcactccagactaccgtgacgttgcggcgagaatgagagcctgaacgaacgatcacccatcttgcccgtccgtgtctcttatcgcgggcaacaatcatctgccggtcgagactgcccgattagactgagttcaatggatgacatgacgattcgtagggccacggcggccgatattccccagatcgacgaactgctgcggcaggtgctcgaagtgcatcatgccggccgaccggatctgttcaaaggcggtgtcaagaaatacacggacgaggaattgaaggcgattctggccaacgatcagacccctgtgttcgtggcggttgcgccatctgccaatgacggcaatgacgccgaacataacgccgactcccccgccaccgaccaagtgcttggctacgcattctgcgtgttccagcagcacctcaacagcaatatcctgaccgatatcaaaaccctgtacatcgatgatctatgcgttgacgagcggtcccgcggccaccatgtaggctccaccttgtatcgctacgtgctcgacttcgcccgtcaatccggctgccacaacgtaacgctcaacgtctgggcctgcaaccccaaagcccaagccttctacgaacgcatgggactcactccatattacatcggcatggagcaggtgctgtagcgccgccgtttcagcagcacgatgatggcgatgatcgcagcgaggctgcatagggccacgccatatacaaagcccggagttccgaaattcatgaggcagattgtgatgttaccggtagtggttaccgaaaacacgacgataagcgcgacgatacgaatcatatccagcagtccagctgcttgagccaacagacgctccggtaccaccaatttggccgccgtgcacagcaaagtcgcctgaacggcgagcagaatcgcccattcccagaacatggacggttctttaagcaacgtggtctccggaaacatagacaccacctcattgataaaccacggcgccacaacaatctccacatatgcgagcccaatacaacacacgacaagcaccacggcaatggcatagcgccaagcgacgtctgttttgcgagatttacgagaaatgaatgcgataccagcgttcatggctatgctccttaatccaatatcaatatcaatggatgaacctgcactgcaccgtatgccaccatcataatatatcgaatatcgatataaaaatatcgaaaaacactttcaccattcacctacacatccgcaaacccatgaatacacatgttcttaatcgggatggggagtgcacaaagaagctctgtcaccccagcagattgaggagatcgtccttggtgagggtggcgatggaggcgggggcttcggtgagggcgctggcgccggtgccggcttcgtcggcaagcaaggaagcgtcggtgaactggcgggcgagctcgctcttagtatgctgaagctccaagatacgttcttcgatggtgtctttggccaccacctgatacacgttgacgtcttcggtctgaccgatacgatgtgctcggtcggtggcctgatcctgtgcggcagcgttccaccatgggtcggcgtggatgaccacgctggcaccggtcaggttcagtccggtgttgccggccttcagggaaatcaggaaggcaggcgtatcgtccgcattgaactggtcgacgagttcgagacgcttcttcttgggcgtagagccggtgatggtgtagtagcgcaggccttgcgcgtcgaaacgttcggcgatcagatcaaggaagctggtgaactgggagaagatcagcgccttcttgccttcgttcacacaggtttccaccagttcggtgatggcggcaagcttggccgattgatccttggcatcggcgtacagcagcctcgggtcgcagcagatctggcgcaacttggtcaactcggcgagaatgcgaatcttcgacgtgttgaaatcggcttcttcgctgtgttcgagctgcattctgagccgctgctcgtgagccgcatacagtttgcgctgttcgccggcaagccgcacggtcagcgtggtctctagcttgtccggcaaatcggtcaacacctgggacttcagcctgcgcttgatgaacacgcccaccaacgactgcaattggcgagatacccgagcggcctcaggattgacttgtgcggcggcccgaccttcagccgtgctgccatccgcggcccgggcattggagatgggcaactcataacgctcatggaatcgcttatatgagccgagcagccccggcatcagaaagtcgaaaatgctccatagttcggagagtcggttttcgatcggcgtgccagtcaaggcgaaacgatggtcggcggccacggccttgaccgctttggctattttcgtggtgtgattcttgatgtactgggcttcatccaatgccatgacattgaaacgttgctcattggcggtgtaatcatcgacatctcggcgcagcaggtcgtatgaggtgatgagcacggtgggttcatccgcccggaacgcacggccgatggcggtacggcgctcggctttggtaccggccaccaccacggcattgaagctcggggcgaacttggtgaattcggcaccccagttgtacaccaaggacgccgggcacacgatcagcgatgggccaaggctgccgttgcccatctcgccggtattccgctgatatcgagacaggagcaacgcgataagctgcacggatttacccaagcccatctcatcggccagaatgccgccaaaacccttgtcacacaacgtgttcagccattggaagccttcgacctgataagggcgcagaatatgcttgagactatccggcacttcatacgacttagggtcgatgatcttgagatcgtcgatgtattcggtgaacgaagcgtccttgactacatcggagccgtcatccggcagctcaccatccagtaggaatgctcgaccgcccggcaactcgatcagtccggagttgagctgctgctcgctcagatcgaggtcactggccaatcggtccaacgtgctgagattcgcgccgctgagtttgacaagcgttccgtccttcaactgatggaatcgttgacgccgacggtacgaagatagcaaggcacccacttcgtccggcggcacttcatcagcgaggggtgatatctccaccaagttgcctttgatggacaatccgactttgacgcttggtggcttgggcgcgatcagccggtcaaaagccggtgtggtgaagacctcccccacttcctttagtgccggcaatccctcgtcaaagagacgaacgatctgcgtggtgtcatcgcgatcgatagtggccgcatcagacacgaattttttggtggcctttcgcgcggccggcgttcggaacccattcaccgtctgatgagtggcggccgcaacgcgcttgcgctggtcaggcatggtaaagaattcacgcactacatcaatcgcaagatgctcagcgtcgaaatcacgcccaatcacgccccgagacaaggggatggaacgctcgccctcagcatgcaccgtcgggccatcgggtagcaacgggacaatggcatcgccgtagcgtgccttgacctcgcattgcacaccatgctcatcacgatccagataaaactggaggctgcattccgtaggacttaattcagccagctcgcgaggaatctcactggcctccaacagtccagcaccaaccagctgaggcaatagcgtgcgtgcgaatagagcgatgtcatcgccggcaatgacctgcccctcgccatcgggttcaaacaggtctcccaatagtcctcgcaacggaatcaatcgtttcgggcaacggacgaatcggcatcctgctgcgcttttacgctgagagcccgccatcatggcggataccgcaccggccggattagtggaggcgagcaacagccatacattcttgccgccgtcaatcacggtttccaccgctggcactccggtaagcaggtatccggcatccggaccatacgtattgaaatcacgccgcgcaatgcgcatgagaaaatctggctcgccaccatcaactggcaccgatgcaggctgcccggagaaccatgtgttcagcacgagctgtacgcctctgccctcacgtacggacagcaaccgggccacttccggtgctgaaagcgtcagatgacggtcgatggcgatatgcccgtaatacctgtcctgctgctcggccgcacgacgcacggccatcgcatcatcaaggacgtccagcagtgggcgcgaatcatcatcaagcatatccggcgtatgagtaaaggcaagcttctgcccataatccgcatagtcgccgttcgccatggcaagcacaaattgcggaatcgatttcagcacatagctggacccattggaagccgagccgatcttgaactccacgctccacacgccgtcgatgaaactcaatatcgggacaagctgcacctgccccaagcccacagtctcgctgtcaccctgatacccgccgcctcgggtgccggcacgagagccgtatccgctttttgtacgccgagcatttgcaccgtttttcccttgcgtggcatcaaaccgacgcataaccgcattgcgacgacgaattttggcttgagcgtcttgcctatcggcgtgctccatatagtcaatcagcgtccgagacggcctcacagccccggcacggtagccttcaaaacgctgcggatcatcgcagaatatgaaggcgagcgcaatcatgtgcttgcacatgccatagccacggccgtaagccgggcatgagcacttgccgccgacctcctcccccgtatcgaggtcgaattgcacgctggtgcgatacctacttgatgggctggtggtgccacgtagaataccgtcaagttcggcatacccggttcgatgattttcgctgtataccggattgataaccatggtggccgctttgcgcgcaatgctacgggcacgagcgagcacggcattcgacgatgacgattccacatcgttgcgtaacgcaaggatagggacggcatgggcttcggcacgcttcgcagacccggcgaaatggccttcgtcctcatcgtcgaaccatacggaacgtccttgcctgagacgatagggcatcaccgcatcggcggcggacaaactgtccgttccgccaaacgttacgtctctgctgccggccgcgcctgagctaccaagtattccacccgtctcaccagaaatgccgcctactccgccgtttttaccggcatagatgcccctgcccccattagtgtcatcagtgtcatctatgtcataccgaccgtcgtcgtaatcggcatcttcgtcgtctccccttttccaaggattgcgacgacgcaacgcatgaccccaggaaacgccggaatcatcatcctcataaggcaggaggccatcgtcatccgcattatcgggaacatggccaaacacaccataccctttgctcatgggcgagcctcctttccagcgaatgtatttcaacccaacgtttccatcctagacgaagcgcgcggtagccttaacgtatggatgcagacaagccggcgcaacgcaaatcctatgcagggaacaccaccctcgaaatcttcgaggtgctgtggcgtcacagctactttgggcatggcctgaccgtgcggcaaatactcgatgaacttgcccgtaaacaccagctggaagatccaagcgagctgccgaccgagaagaccatacgaaatcagctcaaaaagcttaccgccacggaatttctcggcagacatatcgggcatctcgccgaaagtgatcttgccggcatcgaatgcaagaatccacaacccggctggtatcttgatgcattcctgtccaccgccgaaatgcgactgctgctagacagtcttaccctatctcgcatcagcctcgacaccatggacgacctcatcggtaaaatccgcgagctcgcaggcgccgccgggcaggcagtaggctacctggaccatgtggccacctacacgcatatcaacggtgagttcctatccactatcgaccagctgaatcaagccatcgaagaaggccatggcgtaaccttccaataccgtgattacggcccggatggcaccttgataccacataaaagccgtacgggtgcaggccgaattacctacaccgccgacccgtaccagatggtgtacaagaacggacgctattacctcatctgccacctgcatggcgaagataacctccgcattttcgtggtcaaccgaatcgccaacgtcagcgccaaaggcaggaacggcacagtgccactggaaaaaccagcaccagctgattttgacgcagtgaacttcatgcgccaccgtccataccccgtagccgatgccccgattcgcatccgcatggccgtacgagacgaatccatgctcaacaacgtgttcgaatggttcgacgaccctcaaatcaaacattcgccggacggcacacagttcgaagtcatcgtcgatgctcccgaacgcgctgtgttctggtgggcattgcagtattcctgggatggccgcgtagtgattcttgagcccgattcgctcaagcgcaaactctatgatgccgggcgtcgcatggccacagcctatgctcccgaatgatgcaacatcacatcgcacacctccttgtcgagttgttcaccagcgaatttcaccggagaacctatcatcccatcgccaatcacactcggtaattttttaccgggaaatacgatttcaagccatttcgcgggcatcgtccctcacctaggcgcacataaggctaaggtgggaatcattaatcgcatcgcgcgtccacaagcgtgcactaacgcgtacaacaataaggagcaactatgagcgaagagcgtaccgcatggggctggggtctggccagcgtagacgccgccggcaccaccctggacgtctggtaccccgaactgaatctcggtgaggcaccggccgaggccgatcgcccgaaccacaatttcggtactttggctcacgatgaggccgacgcccgtggcattcgccgcgtgccggtattcgtcgtcagccagttggacgagccgatcagtaatgccgcggacgcttacctgaagctccatttgatgagcatgcgcatggccaagccgaacacgctgaacctcgacggcatcttcgcccagctcgccaatgtggtgtggaccaactacggccccttcgccgttgaagacttcacgctgcgcaaggccgacgtcgaacgcgcctccaccgaagccgctctcgctttcgcctcccaggccgggctgcctgccgcagctcctgccgccactgtcaatgtgttcggtgtggataagttcccgcgtatgatcgattacgtagtgcccaccggcgtgcgtatcggcgacgccgaccgcgtgcgcctcggcgcttacttgtcttccggcaccaccgtgatgcacgccggattcgtgaacttcaatgccggcacgctcggcgtctccatggtcgaaggccgtgtttcgcaaggcgtggtcgtgggtgacggttccgacatcggcggcggtgcctccatcatgggcaccttgtccggtggcggcaagctgcgcaattccatcggcgagcactcgctgctcggcgccaacgccggtatcggcatctctctgggcgataactgcaccgtcgaagccggtctgtacatcaccgccggcactaagatcaccatctgggacaaggccaaggccgccgctggcgaaccgctggaagtggtcaagggtgctgagctctccggcaaagacaacattctgtttatccgcaactcggtgaacggccgcatcgaagcccgctaccgcaaggtgggaattgagctcaacgccaagctgcacaagaactgaaattgaaataatggagcgttatcttcgttgcccctcggtcgacgtaccttcgtacgccttccctcggtgcgcctcgataccgcacacattatttcaatttcagaactagccctgctagttcttatgcagccgtcgcagcatagctggtttgcgctgtacatatagaaagcgcctcactggaatctccagcgaagcgctttctcaaaccaacaatcaccgctcgtccatcggcacgaaatcgcgctcgaccggaccggtgtagacctggcgtggacggccgatcttggtattcgggtcggccaacatctcacggtactgcgcaatccaaccgggaatgcggcccagcgcgaacaacgtggtgaacatggccggatcgaagccgatcgcccgataaatcaagcccgtgtagaagtcgacgttcggatacaggttgcgcgatacgaaatattcgtcattcagcgcaatatcttcaagctcggtggccacggcgaacagcgcgcgctcgtcagacggcagcttctgcgtatcttcgcgctccatgatcttttccagatacttcctggcaatcgccgcgcgcggatcatacgacttgtatacacggtggccaaggccggaaatcttctggccattctccttggcatcacgcacgaactcggccacagacttgccggaatcacgaatcgccttcaattggcgcagtacggcctcattcgcaccaccatgcaacggaccggacagcgcattgacgccagcggccaccgccgaatacaggttagcgtgggcggaaccggcgatacgcaccaccgaggtcgagcagttctgctcatggtcggcatgaataatcaacaaacgacccaaagcatgcacatacagcgggtcggattcaaacggctcgtacggcacagcgaagcacatgcgcaggaagtcgtccacatagccgcgcgcgtaatcggggtacagcatcggctcatcgcgacgacggcggaagatgtacgacacaatcgtacgggccttggccatgatgatcttggcggcctcatcaagctggtcgttgtcagaaatatcggtggtgtccgggtagaacgtggccagcgcattgatggcggaggcaagcacgctcatcgggtgagcggagcgcgggaacgaacccatgaaggtacggaagtcttcgccaaccatcgtcttgtgattgatgtccgcacagaactgctcatactcagccctgctcggcagctcgccgtggcgcagcagccacgccacctccagaaaatcggagttctcgcacagttgctcgatggggtaaccgcagtagcgcaaaatcgaatgcttgccgtcgatgtaggtgattttcgattcgcactgcgcggtggtgaggaatccgggatcaagcgttacccagccatcgttgcgcagtttggaaacgacgatgccatccggccctgcactagccttaaccacgggcaggttgaacttgttcgaatcgacatcaagttgtgccgttgccattcgcgcaccttcctcttcatgaaccacttaccccaaacattaacgttcacgcgttcgcgaacactagtgttcggtactctatgtcttctgtgttaccgctggcgaatgccggtcgatacacgaaagccgaagtgcgctcatgctatcaaagcaaacgcacttcggcttgttacgtctcgaattcgcgggaaaaccgcgaacagacggacagctaatgagacgctgatcacccatcacaggccaatcaggcacctaccatacgccaaacgccgatcagaggttggtgcgatcggtgaagacgatcgggccgttctcggtgatggcgatggtgtgctcggagtgggcgccgcgcgagccgtcggaggcacgcagggtccagccgtccttcggatcctggaagatctcgtcggtggtcttgaggaaccacggttcgatggcgatgaccaggccttcgcgcagcttgtagccgtggtgggcgcggccgtcgttcggcacgtgcgggtcgccgtgcatgatgtggcccacgccgtgaccgccgaactcgaggttgatcgggtagccgtattcgcgcgcgacgtcgccgatggtgttggagatgtcgccgagacggttgccgggcttggccacgtcgatggcggcggcgagcgcttcctcagtgcacttgatgatgcgcaggtcttcggggtccgggtctttgccgaccacgaagctgacggcggaatcggccacccagccgtccacagagatggcgagatcgagggagacgaggtcgccgtccttcaggctgtagtcgtacggcacgccgtgcagcacggcgtcgttgacggaggtgcagatgtagtgggcgaacgggccggtgccgaagtcaggagcgtagtcaacatagcaggattcggcgcccttgcggtccacgatcttcttgtggacgaactcgtcgatttcgagcaggttggtaccaactttggtggtctcctgcagttccttcagaatgccgccgacaaaacgaccagccggcttcatttcctcgatttcacgaggggttttcagttcgatcatgagattctttctaccttgttgagacttgttctcaactctagaccagcccgaggtcaaccgccagaagcctacctgaaatccactcgcagcccattaatggccaaggccgagaaaaagcgcccggcagcacatagcctgcacgggcgctttggattgattgtctggggactggttgcatgaagcgtgagattacttgcgacgcttgccgaaagtgaacgcgcgaatcactgaagtaatccccatcaccaccatggcgcatccgccgaagataatcatgaatacggcggagctcagcgggctcatcagcaccacgaagccggcgataatcgagatgatggcataggcgatggcccagccggaatgcgggatacgccacgattcaaccagcgacagcacgccttccataatccatccgaaaccgaccatcaaagtaatgagtaatgccagcgtctgaccggtcatgccgtagttgcgcacaaccaccacgccgccaaaggtcagcagaatgccgacgaacacgtccagcacacgccagccgcccggcagacccggctccacgagagcgctgacgatgcgcaccacgccggaaatcacgaaatacacgccgagcaacaatgcggccaaagccagcgtcttgttcggcaccagcaacagggcggcgcccaaggcgatggcggccacgcccaccacgccgtaaatgatgcgaatcttggtcttggctttttccggcagccattcctcgatcaggcggaatggactgaaattgccgacataccagttggtctgctgccagccgggttgactttgatcgccccatggaccattcggctgcccgtccgcttggctattcgattggccgtccgcctgataccgccgaccgtccggcccccatgccggctggccgttcgggccatagttcggattgtaggcgtacgggccgtagtacgggttctggttcggtccgccttgtggctggccgttctgcgcctgctgattctgagtgtcttgcgctcccggcgcaccttgcggaggatattggccgccatgattgctgtcatacgcgccatactgcggttggcccggttggcccgccggattcggctggctcggctggctctggttgggctggcccgtctggccattccactggtcctcgttcggattgctcatcgtaactccttagctcaaggtccatgttcagattccacatactatgatagacaagttgtctaatttgaaccatcaccacaattaggcaatctgtctagttcactgacagcgcaatgcccataacgcaatatctgcaccatcagcgcttctcccccgccgcgattaggcttagggccatgaccaacgaaaccgaaacgctgacgtcgggcatcgacccggcatcgttctcctccgtcatcaagccgaccaatgacctgttccgctacgtgaatggcccatggatcgacacctaccgcctacccgacgatcgttcgcgctacggctccttcgacaagcttgccgaagacgccgaaaaccaagtacgcgacatcctcgacgccgacgactgcccggctgtcaagtctgaggccctgtaccactcattcctcaacaccgacgccatagaggccgccggtcttgacccaatccgcgacgagcttgacctcatcgattccgccatcgacaaggccgctctcacgcgcgtgctcggcaccatcaacccagccggcggccccgacctgttcggcttggccgtttacggcgatcccggcgacccggaccgcaatatcgcccaccttgagcaggccggcctgtgcttgccggatgaggcctactatcgcgaagaccactatgctcccgtgcgcgaagcatacgtggcgatggtcgccacccagctggtgaacgccggatacgcgcccgccgccgagtccaacggtggcgatgagctgccgtccaacaccggcgatgacgagagcaacgctcccgccacggttcccagcgaagccgcgcttgatatggcccgccacttccttgccgtggaaacgaagatcgccgccaaccattgggacaatgtggccacgcgcgactcggtgaagacctacaaccccactgattacgccgatttggccgccacgctgaagaacttcgatctcggttcttggattgacgcctggcagaccgcctatgacgccaccgaggccgccaaggctcagccgatcgatttcaagtctgtgtttgcgcgcgccattgtgcacgagccgagcttcctcactggtcttgatgcgttctgggccgaggccgatctggccgaccttaagctgtgggcccgtgttcacatgattctgggcttcgcctcctccctgtctcgcgacttcgacaccaccaactttgacttctacggcaaggtgctctccggtgccaagaagcagcgcgatcgttggaagcgcgcggtgagcctggtcaacggcatttgtggtgaagatgtgggccgcgaatacgtgcgcctgcacttccccgaaagctcgaagcgccgcatggaagagctggtcgccaatctgattgacgcctaccgcgtgtccatcaccaattccgattggctgggcgaagacaccaaggccaaggctctggagaagatctccaagttcacgccgaagatcggctacaccaaccactggcgcgattattcggcgctgagtgtctccgcggatgcgctacccgccgagaacgccaaggccgcgaacctgtacgagaccggctatcagctggccaaggtcggcaagtcggtcgacaaggacgaatggctgatgaatccgcagacggtgaacgcctactacgagccgagcatgaacgtcatcgtgttcccggccgcgattctgcagcctccgttcttcgacccgaaggccgaggatgcggcgaactacggcggcatcggcgcagtgatcggccacgagatcggccatggcttcgacgatcagggttcgcagtacgacggcgacggcaagctcaacaactggtggaccgacgaggatcgcaagaacttcgaggcccgtaccggcgcattgatcgcccagtacaacagctttgtgccgctgcagctggccgagaagtacgctgacgagccggataaggcaccgcacgtgaacggcgcgctgaccatcggcgagaacatcggcgatctgggcggcgtgaacatcgcactcaaggcgtatgcattcgcgctcggcaaggcggcaggtaagtccgacgccgaagaagacggctcccccgccgccatcaaggcactgctcgataccgcccccgaaatggacggattcaccggcctgcagcgcttcttcctgagctacgcctccatctggcgcaccaagaaccgcgacgagctggccgaacagtacctgcagatcgacccgcattctccggccgaattccgcaccaacggcatcgccaacaacgtggacctcttctacgatgcctttggcgtgaccgaaggcgacgccatgtggctcgcacccaaggaccgtgtacgcatttggtaatccccgttatgtaaaagaaaaccgctgtgcttgcctcgattacaggcgaacacagcggtttttcatgatgtatggttggcactcagaattcggaatcactgggattggaagattcggcgaaaccgtcgacgtgggtttgttgggccacgggctgtggttgattggtgccggcgtccggttgcgacatgacggcatcggccacggccgcggactcggttgatggcgacggcgattggccggaatcggaggtgaccccaaattcgacggggccagattccgacgaggtcgcatacgggtcaatacccacaccggatgcggcaccgcccgcgccatattgcgttggcctcacgtgcagcgacgatgctcgttgcccgtttccgccatccataccttcggcggcaccgttggcattgccgttaccgttgccaccattgcctccgttaccattaccggcacgctgtggcttgatcagcgacgtggtgccgaaggttaggtcatgcccaatgttggtggcttcgagaacggttctactgcgcggttcgccttgctcattggtccactgctcggtgatgagtgagccgaccacaatgatgcggtcaccgcggcgaaccgaactggcggcgttcaccgccaaagcacggaacgctttgacgcccacccatgcggttccgtaatcctcccattgtctggtagtcgggttgagtcggctgcgagtgctgcccatacggaatgtcagcacgcggaagctctcggttccgcctagtgtcggatcaccggccacaaagccggtgacggtcactgctgcttgttgatttgccatgatcggtcctttcctcggcctgctggcctgttgtttggatgtggaccgccggagcctgtctccggcttcattgccggcttgcacgccccagcggtacctccactgtgaggcatgacgtttgaagtgcacaagggcaactggcaaatgtggatactgtgacgcagttgaatttttaagaatgtggataagtttcggttatccacaacaaagcgccattctgcgactgggcagaatggcgcttgatgcgattaacgccgaggctgagtaagtgggactcagctgagggcggcgaagcgctcggcgagcgcgtcggcggcttcggcggcgggcacggcgaccttgttttcgccgttgcggtcgcgcagttcgatggtgccgtcgttgacgtaatcgcggccgaccacggcgaccagcggcacgccgatcagctcggcatccttgaacttgacacccggagacaccttcttgcggtcatcgtaaataacctcaagacccttggcctcaagctcggcgaccagcttctcggcaccttcaaacgccacggcgtccttgccggtggccaccacgtgcacggcagccggggcaatcacggacggccaagccaggccggcttcgtcgtggtgtgtttcggcgatgcaagccagcacgcgggaaacaccgatgccatagcagcccatccacaccggcacggccttgccgttctggtcgagcaccttcaggtccagtgccttggagtacttgagacccagctggaacacctgaccgatttccacaccacgctcgaagctcaacggaccggaaccatccgggctcatgtcgccgtggcgaacctcaacggcttccaccacgccgtcggccttgaagtcacggccgtacaccaggttatagtagtcgacctcgttctcatcggcaccagtgaaccaagcggaacccttgaccacgtgcgcgtcgatcaggtagcgaaccgggttcttcacgccagcagcctcggcctgcgggccaagcaccatcggtccgatgtagccgggcaccagttcggggtgctgcttcaggtcttcctcagtggcttcctcaagttcggcgggcgcgaactgggcttccagtcgcttcatatccaccgtacggtcgccgggcacgccgacgacaatcacttcacgccacggctcgtcatgctcttcatcctcagggtgcttgacggtgatcaccacgttcttgaggatgtcggaagcctgccattcacggccatcagtacgcgggtggtcggcgttggcacgctcgatcatgttatcgatggtcttggcatccggggtggcttccttggaagcggcgggagtggtggaagcatcgatttccggcagctccggagtgctcagcgcctcaacattccatgccttgccggaaggtgccagcgcgaaggtatcttcgccgatcggcatcggagccaggaactcctcggatgcggagccgcccatcgggccggacatggcgaacacaggtacgtacttcaggtcgagacgctggaagatacgctcgtaagcgccgcgctcgtcatagtaggccttgcgcatgccttcttcatcgatggtgaaggagtaggcgtccttcatgacgaattcgcggccacggatcaggccggcgcgcgggcggaactcgtcgcggtacttggtctggatctggtacagggtgacgggcaggtccttgtaagaggagtacatgtccttgaccagaagggtgaacatctcctcgtgggtgggagccagcaggtaatcggcctcgtggcgatccttcagacggaagatgttatcgccgtactcctcccagcgatgggtggcctcgtagggttcgcgcggcagcagggccgggaagtgcacttcctgggcgccgatgccgttgatctcctcgcggatgatggcctcgatcttgttcagcacgcgcagaccgagcggcagccaggtccagataccgggtgcggccttgcgaatatagccggcgcgctgcagcagcttggccgaatcgacatcggcatcagcggggtcctcgcgcagggtgcgcaggaacatggttgacatacgaagggtattggaagtcatgtgttccaagatattcgcgtgaaccgacaagcccgcctgctattcgcactattccggccttcatcttggtattcggactcactcgtgcaacaatgatggctagaagggtagaagggcacgatgacgcagccgaccgagtaacaggggaatcagccggaatccgcggagcaaccggtgtatcaaccggccccagcatgggccccgcaattttctgctgcagcccccgcaattcccaacggcagttccacaacaagcggtatcgcaacagccaatggccatgccaccgtttgcgcaatcgcctatgtcggtcccggaacaagcggcctgcccgtatcaaccgtaacagccgggccgggcctatgcttctccctgcccctacccgaatccggcaatggcccagccgaaccaaccatcagtcgcgcaagagcgattcgggcgttcgtcgggacgtctgaccgcatcacaggttattgagacatgcgccaccattcttgccggcgtaatactcctcggtcttgcatggaccaacccgcaaccgtatgccccggtggatcttatcgccggcctgtccggagcggccgcgctgattgtgggtgtgcgtttgccgcaagtacgcccgatgctgcgtagctggccggcattgtggcttgctttgggcggcatcattctgattgtggcagccgcacgctatgaggcgagcctcaaatcgatgaggacgattgccgcgcgtattggcgatctgcggtgaaccgcgcgggcgacctgaggcagattaccaacgtccggcgatagcagtcctgcatacggggcagtgcccattgccaccgtatccggcagataaacgattggcaataattcgataccaatcgcgttccacgagcttggcccggcattcagggtttgggcaatacgtggtatcgccttcacgatcatgcacgttgccggtgtacacataattgagtccctcttcgagggcgatgtctcgggcgcgggtcagagtctcgtgcggggtgggcggtacgtccatcatgcggtaactggggtggaatgcggagaagtgcagcggcacgtccgggcccaagtgctcgcgtatccatgtacattcagcatgcagctgggcgtcgtcatcgttgagtccagggatgagtagtgtggtgagctccacccacacgtgttcgccttctggtgtgcatgcctcgttgaccgcataatcgatggtctcgagcacatcggccagatgagtgccggtcaccttccaataaaattcttcggtgaagcctttgagatcgatgttggcggcgtccatggcggcgtagaagtcgggccgggcttcggcgctcatgtatccggcagtcacggcgatgggatgaatgccgagcgctcggcaggcttcggccgtatcgatggcatattcggcgaacacgatcggatcgttataggtgaacgccaccgagtcgatgccccggtcggccgcgacctgcgcgattttctccggactggcttccacgccgagccggtcgaaactgcgggctttggcaatatcccaattctggcagaatcggcaaccggaattgcaaccagccgtaccgaaactcagcacgctggaaccggggtggaagtggttgagcggcttcttttccactgggtccacggcgaagccggagctgcggccgtaggtgtcggagacgatgaggccgtcgtggttcgagcgcacgaaacagaagccgcgttggatggggcgcagtacgcagcggcgtgggcacagttcgcagcgagcgcggttggtaccgtcgtggaattgcgtttgccagcggcctatggcgggattatgggcgtgcgtgactggccgcatgaccgtacgattcccgatgaccaccctccggcgcttcgcgccacctcctgccagcgggaggagatatggttgctgcgttagtgctcggcataggcggtcacctcgtagcgttgacagtcgatttcgccatcgttccagtcgtaggacgggcggatgccggctttggcgagcaggtgagcgacgaaatcgtgcggatcgggcagctcatcccacacttgtggcaggaatgtggcgctgaggccacaacggtcggcgagaatcagaccgtctttgccggggcgtaatacttcctcaagttcagtgcgcgaacgtaccgggcgttcgacgttgctgccgtcccgtttaacggcgtcggtctgaggtccggattgcagcaatgccagagtcgcggtcttcgagccggtaccgcgcgaatcggcgtcacaggagttcacggtaatcggctcgggctcacccaagacggatacctccacgttgagcaacgggtattccgcggcggtgaccggggtgaaacgtgggtcgcgggtggcggcatccactgcgtgctcggccacgtccttgccgagcgagcggtgggcgaccagcgaaccaatgcacccgcgtagccggccaccctcggtcagggtgacgaaacaggcaccgggctcgttcagccatgggtttgcggcaagaatggacgcggtcgaatcagcggcggtcggatgctcgatatgcagccgttcccggatagcggcacgggcaagtttcagcagcacctcaccgtgggatggcgtacccgatgtgcctaagtcatctgcaccggctagagcatctgcttccggcttggattcccacgcggcaaacgagacatatcccactaccggctcgtcgacgtcacgcattgcggggcgaggttggccagcgagcgccacttcgccgtcgtcgccggaagtcgagcagcccagctcgaagagcttcatgtccttgcggccttttaacacatccagaaggccgttgatcgggtatgcgccacaggcccggcgagggtgaatcggcagatgcaaagccgcaatgtccgcaatggtctggtcatccaacgcgcgagcgacttcgtgcggatgatagtgcgagagatccgaactaatcacgatgacggtttccgggccaccccacaaagcacgcaacacatcacccacctcttgtggcgtggcatcgcccgcgttcaacggcacgatagtgaggtctgggccgagcacggtttgcaggaacggaatctgcacttctaccgcatgttcttgtgcgtgggttgggccattgacgatcattgcgggagccggcgcgcccgggcgggcatgtgtaccggagcgcaatggctcattgacagacaggcccagagccttatgctcagctgcaatgtctaccggcacagtgcccagcggcgtttcaaacgccgctgccgtggaacaggcgacgcctcgcacggccacgcggtgagtcggccctacgattaccgcgcgagtcacgctcccccgcccacgctccaagagcgcgtaagcgagcgcagctgccgtgccggaatatatgtatccggcgtgcggcactattaccgccctcggcacccccgctggaagtgtgggctccaactgttgcagaagctttcggccgtaatcgagctgctggttgattagctgtttgagcgcggtgcggtcagccggataaaacgaaccggccaccgctgacggacgtattgcgccagtgattttgccgctgccgtctgccgcgcttgctgcatctgacgcactagccacactgaccgtatcgatttgcacaccggctcgggcggcctcgcgaacctcattgtttccacgaaatatctcagatagcaccataactaccacctcttatttcatggtagccgctacggagcgcttctaaagatcagaacaacgcgtcctgggcgaagtcatcatcgggattggcaccgaattcgtccggctcagcaggtttgaacgcgcttgcaccttcatcggccaactggtcggaggccgcggccgaggcttcgcgcaggtcgccgtcgagcaccacggcatcgggcgagacgaggaacatgcgttcgttgacgccggccaaatagaggccgcccaacgattcgactcgggacagcgccacatatcccatgcctggtgcgaaggtgcgcttcaggtccatgaccgcacggtcaagcgtcatgccttgcgacttgtggatggtgatgccccacgcgcagcgcaacggcacctgggagacggaggcgagcacggtgtcgccgtccatcatctcccatgtggcctgtttcatggtgacgatgttgccgttctcgaattccacgatcggccagccgcccttgttctcctgtgcgaagccacgcacggtgccgagcgagccgttgacgtactggcgatcggtgtcgttgcgcagggccatgacagccgcgccctccttgagtaccagtcgctcgggggccaacatgttctttttgagtcggtcgaccaggttggcagggcctgctgtctcggcgtggaactcgtgcggctcaagcatgatctggttcaggcgcatgtcgttgagattgtcggcctgccggttcaccgggaacaggtggacggcgacctggccgggctcgggcagtttgcccaaacgagtgacgagcacgtcacggtcggactgggtcacgtcgccttcgcgaatgtcggtgagcacggtcagcagttcgccggtgtcctgacggtgctgttcggtcagatagcagatcaccggtttgagttcgggccataccagcgattcggtgatgaagccttcggggttcaagccggcacgggcataccgttcgcgactggcgatgaattcgggcgtgggggcgatgaggtcgcggttgcgcccggacaccgaaaccggcggcagttggaagaagtcgccggacaagacaacctggatgccaccgaacgggcgtggatcacggcgtacttcgcggcagacttggtcgaccatgtcgaacagccatgcgtgcagcatggagacctcgtcgatgacgaggatgtccgtggcctgaatcttgcgtttgcgccgggatttgatgagtttgagcaggctggcgctcagggcggcggccacgccgacgccgctccacgaatggatggtttggccgttgatatgcgtggaggcgatgcctgtggacgcggtgactgccacactggcgccgtcggcccgagcctggcggatgaactcgttcaagacataggtcttaccggcaccgggcgcaccggtcaggaacacgttcgcgccggcgttcagaatggccagggcttcggtttggcgcatatcaacctctctagactctcctcagggaggggagccaagtacggcggactacttattgaggatgctggtggctacgatgtcggcggcgatggccttggatgcggcatcgtccgggccgggggcgggagccataaacgccttacggtagtagcgcagctcgtccaaggactcgatgatgtctgcgagagcacgatggccaccgttctttggcgggcggttctcgtagacggccgggtaccagcggcgggcgagctccttgaatgtgctcacatccacgctgcggtaatgcaggtggctcatgaggttcggcatgtaatggtcgaggaacttcttatcggagccgatggtgttgccggccagcagcgggcgcacgccttccggcgtgaagcgcagcacgtattcggtgaccttctgctcggcctcggccaggctcaggccattctcccactcgttgatcaggccggaacgggtgtgcatctggcgcacgaaatcgttcatatggttcacggccttctcggacggcttgatgacgtaatccacgccctcgtccagcacattcaaatcgaaatcagtgggcactacggacacttcgaccagttcgtcgccgccgaagatatccaagcccgtcatttcgcagtcaatccaaatcaggcgcgaatcctttgcgctgtaagtttctgcatcatggctgtcgaccatggtaagcctcttttcgtcatgtcacccgttattacaagaacagttcagactataccccagcgcatacaagctatctcgagccacatacgcgaaaagggcctgcataagcagacccttttcacaaggaatcaacccctaactagcgcaagctagcgggcatcaaccgatcagttgttgtggaagccggagtagttcggggcttcggtggtcatcacgatatcgtgcgggtgcgattcgcgcagaccggcgtcggtgatgcggatgaacttgccacgctccggcatctcggcgatgttgtgggcgccgatgtagaacatggactggtgcaggccaccgagcatctggtagagcacggcgttcagcggtccgcggtacggcacttcgccttccacgccttccggcacgaccttgtcgctggaggtcacgtcggcctggaagtagcggtccttggagtaggacttcttgccgcgcggggccatggcaccgagggagcccatgccacggtacagcttgtactgcttgccgtgcaggagcaccttctcgcccggggcttcctcacagccagcgagcgtgccgccgagcatcacggaggaagcgccagccacgagggccttggcgatgtcaccggagtagtggatgccaccgtcggcgatgcagggcacgccagcggcacggcaggcctgggcagcctcgtacacggcggtgagctgcgggacaccgacaccggcaacgatacgggtggtgcagatagagccggggccaataccgaccttgacggcgtccgcgccagcctcaatcatggcctgagcaccggagcgggtgccgacgttgccgccgatgatctgcacgccgtcgaaggcggagtcgtgcttcaggcgggaaatcatgtcgagtgccagacgggcctcaccgttggcggtgtcgaccacgagcacgtccacgccagcctccatcagagcggaggcacgctgccaggcgtcgccgaggaagccgacgccggcggccacgcgcagacgaccctgctcatccttggtggcgtccgggtactgctcggtcttgacgaagtccttgacggtgatcaggccggtcaggtggccttcctcgtcaacgagcggcagcttctcaaccttgtgctgggcgagcagacggtgagcgtcgtccttggaaatgttggacgggccagtgaccaggttctccttggtcatgacatccttaaccttcagggtgtcgtaatcctcggaggcgatgaagcgcatatcacggttggtgatgatgccgacgagcttgttttccttgtccacaaccggcagaccggagatgtggaacttgccgcacagcttgtcgaggtcggccagagtgacctcggggttgacggtcagcgggtcggtgatcataccggactcggaacgcttgaccacatcgacctgagcggcctggtcgtcgatggacagattgcggtgcagcacaccgataccaccgttacgagccatggcgatggccatctcggactcggtcacggtatccatggcagcggagaggaccggggccttcatcacgatcttgcgagtcagatgagtgctggtgtccacttcggagggaatgacatccgtctcgttcggcagcagcaacacatcatcataagcaaggccgagcttggcgaaaatcggaggaaggggagcatacgccgattgggcgttcaattcatcgaggtttgtagccatacaaacactatatgaacacgcgctgaccttcacgacacacgcttgtgagcgctcacttatccgctgccgggtcctgcacctcacccgcctgcgagtcccgcgaatccgcaggcgaatcagtcatcgaatccgctgcctgagagccaatcgaatcccggctctcccctactgcagactgcgacttaaccgtagcatgctgcgcgttcttgcgtgcggattcgagcgtcaggttctcggcttggatctcgggaatacgatgccgcagataggggtacatcgtggctatggtcagcaccaccacggcgatgggcatgcccacggccacatgctgcgctttgaagaacagaatcgtcagcgaaccgaatgcgatcagcgcggcccatccccacaggatcagcacggcgccacgcaccgaatgcccgatcttcagcatgcgatggtgcaggtgcatacggtccggatgcatgggcgactggcctttggccaaacgccgcacaatcgccagacacatgtcgagcacaggcaggaacaacaccagaatcggcagcagaattggcatgaacaccggcagatagatgctggcatgaatcgaggccgggtcaagacgtccggtcatcacaatcgaagcgcaggtgatgagatagccaagcagcatcgaaccggaatcacccataaacagtttggcgggatgccaattatgcagcaggaagcccacgcagatacccaccatcatcacgtcgatcagcgtggccaacgaagcataactcggggaagaccgggcgatgatatacgaataggcggcgaacgctatgccaccaatcgccacgataccggccgccaggccatcgaggccatcaacgaaattgaccgcgttaatcgaggcgacgatcaggaatgcggtgatcgccatggacagactcggcgaggcggtaatcagcgaaccgcccaaaggcagtgagatgatctgcaatccgccccaagccacgaatacggaaatcagcagctgaccggcaagtttcagcatccaatcgagatcccacaggtcatcggccatgcccagcagactgatcatgatgccgccggcaagaatcacccacatctggtaattgccgttgaacaatcccgagagaaaaggcagccgactggcgaatacggtagccacggcaaaaccgatcagcatgccaaggccacccatgcgcggcgtgggaatggtgtgcacgtctcgggcacgcacctcgccaaccgcaccgatttcgatggcgacgtggcgaatcagcggagtcaccagccaggtgacgccaccggcgatggcggcaatcagtaggtagattctcatgcgccgagtccaccgccgttgaggtggagggccttgcgaatcacgttttgggcgatgacgccttcacgcaggatctcgatgccgtcgcgcgcgtacggatcggctttgacgacggtgctggagacatggccttgggtgggaccgccgtccagatacaggtcgacttcgctgccgaacgcgtcaaccgcctcctggacggtctgcgcgctttcgtcgccggaacggttggcgctggacgcggccagcgggccagtcgccttgagaatcgcgaggcacagcgccgaattggggatgcggatgccttgcgtgccggggcgaccatcggcggtgtcggccaaagtctccaacgtgcagtcgggccgggctacggcaatcggcgagaacgcgccaggcagaaacgccgccgacaaacgattcagcggggacggcaggtcgagaccgagctcatcaagctggtcggtggatgcgagcagtacctgcaacgccttatagcgcgggcgacgcttgagccggtagatacggtcgatagcggccttattacgcggatcgcacgccactccatataccgtatccgttggaatgacgaccaatccaccatcccggatgacacgcgccgcctgtgccagcgattcatccgtgactttcagcgttgttccgccttccacgctcacgccacctccgttcgcttgtgtattcacaatctaccattgcaccattgcgccccgacttgcatagttcatcatcgctcgtttgccgtactgccgttttccgattcgccccacacgcacagaccgtagatacaatgagttcatccatgctctttcgcgaaattacaggagtgttcaatgagcgaaatcaatgctgaatccaccaccatgcctcccgtcgaactgcgtatgccgcgcgccagcgagcgcgaggagatgctcgccggcaaactgtacaattcggtagaccctgaattgaatgccctgcgcgagaaggccggcgacctgtgcgcgcgcttcaacgccgcgtcgcgtaccgatcatgccgcccgtgccgcgattctcgatgagctgctgcccggccacggtgccggccttgacgtggtggggccgattttcttcgactatggctgcaacatcaccatcggagagcgcgtgttcgccaacttcaacttcactgtgctggattgttgcccggtgacgattggcgacgacgtgctgttcggcccgaacgtttcgctgctgccaccgatgcatccgttgcgttggcaggatcgtaacgtgaggcaggcacctgatggttccgcatacgactgcgagtatggcaagccgattgtcatcggctcgaactgctggtttggcggcaatgtgacggtaatcggcggcgtgacgatcggcgagggttgcgtgatcggtgccggctcggtggtgacgcgcgatattccgccgcacaccgtggccgtgggtaatccggcccgtccgattcgcgagattacggataaggatgcttccgcgctacagtattacgcgcagtgatatatgaatgctcccgctggcgagctgtcagcggagctgactgagggtggttgccggaaatctccgataaccaccctcagcctcacttcgtgaggtagctcccgccagcgggagcatagtaatgtgagacgtcacgcgccgaggtacgccttgcgcaccttctcgtcgtgcagcaggtcggaggccttgccctccatggtgatcttgccggtctcgagcacgtaggcgcgatccgcgatggacagggccatcttcgcgttctgctccacgagcagcacggtgatgccacgcttgcgcagcgtgacgatgatgtcgaagatctccttgaccagcagcggggacagacccatcgacggctcatccatgaggatggtcttcggatggctcatcagggcgcggcccatggccaccatctgctgctcaccgccggaaagcgtgccggccagctggcggcgacgttccttcaaacgcgggaagtagtcgaacaccatctcaagatccttacccagactggactggtctttgagactgaacgcgcccatctctaggttctcctgcacgctcatgcgggtgaacacgtggcggccttccggcacatgggccatgcccagcgtgacgatcttgttcgcatgcgttttgagcagatcgtggccatcataggtaatgctgccggatttggcaggcaccagaccggtgatggtgtgcagggtggtggtcttgccggcgccgttggctccgatcagggagacgatctcgccgtcgttcaccttgaggctaatgcccttgaccgcgtcgatcgcgccataggaaacgcatagatccttgatttccagcatcagcgcgctccttccgtcagtgtcttggcaatgcttggctccggttccgccttggtggtggaatcgccgtccgcgtcatcgttgttgtcgctgcccaagtaggcggagatgacctgcgggttgttggcgatctcctccggcgtgccggatgcgatggtgcggccatagtccagcacctggatgcgctggcatacgctcatcaccaggctcatgtcatgttcgatgagcaggatggcgataccgaaacggtcgcggatcgtgttgatacagtgcagcagatcctcggtttcggtggggttcatgccggcggccggctcgtcgagcagcagcagtttcatgccggtggccagggcgcgtgcgatctcgagcttgcgctgctggccgtacggcaggttggccgcctgggtggtggccagtccctcgaggttgaagatgcgcagcaggtcgatggccttctcgtgcatctcgttctcctgcttccagaagcccggggtgcggaagatggcgctgcccatgtggtaggtgaacgactcatcgaaggcgacgagcacgttctcctcgacggtgagctgcttgaacaggcggatgttctggaaggttcgggcgatgccggcacgcacgacctgataggtcttcttgccgttcatccgggttccgtccagccagaactcgccttcggtgggcttgtacacgccggtcagcaggttgaacaccgtggtcttgccggcgccgttggggccgatcaggccaatgagttcgcccttgttgatggtcatgttgaagttggacacggctttcagaccaccgaaggtgatgccgagatgttcggctttgaggatgggctgggttgcgtcgctcatcgtgaggcctccttcacggtcttgtcgtcggactggtcatgctgcttggcgctggccgcgggtttcgcgcccttgccggcggcgccgcggaacagcatgcggttgaccagacgcggcagtgagaactcccaggatccgaagatgccctgcgggcggaagatcatgacgagcaccagcaccaccgagtaggcgagcatacggtagtcggcgaaggcgcgcagcagctcgggcaggatggtcaggccgatggcggagacgatcgagccggtgagcgaacccatgccgccgaacaccaccatgatcacgtagttgatggagttgagccaaccggccatggtggggttgagcgagccgatgtactgggcgaagataccgccggcgatgcccgcgaagaacgcggagatcgcgaagacgagcaccttgaggtacgtggtgttgagtccggaggcgccggcggcgatctcgtcgtcgcggatggccttgaccgcacggccgtaacgggagcggccgaacatgaagagcacgaccacggtgaccaccatgatccagaacacgacgtacaggttggcggtgcgttcgatgccgatcagcgcctgtccggcggcgcccttgtcgaggcccatgccgccggctaccttgaggttctggatgatcacgcggatgatctcaccgaagcccagcgtgatgatggccaggtagtcgccgtgcagtcgcagggcaggaatgccgatcaggatgccgaacacgcaggccaccacgccgccgatcagcgtggtgagcaggaagcgggcggtggggtcgatggcaatgccggcggcgaccatgtatttggaggtcagtgcggccacgtaggcgccgatggcctcgaaaccgcagcatcccagcgtcagctggccgagcacgccgatggtgaggttcagggaggtggtcatgatgatggcgatgcacgcggtcatcatgatgcccttgatgtaggagtcggccaagccggattcgcacagcgccatcacgatgccgaacgcggcgaggatgccgatgaagcacacaagataggactgtttggtggaaagcattgtcttcttcatctgatcagaccttctccccttcgttcttgcccataatgccggacggtttgacgagcagcacgatgatcaggatggcgaacacgatggcgtcggagaacgccgaggtgatgatgcccgccgtgatggtgccgatatacgccttggtcaggctttcgatcagaccgatggccagaccaccgatcatggcgcccgggatggaaccaatgccgccgagcacggcggcgacgaacgccttcaggcccagcatggcgcccatcataggcgagacctgcgggtaggcggcgcagtacatcagcgaggcgaccgcggccagaccggagccgatggcgaatgtcagggcgatggtggagttcacgttgatacccatgagcacggcggcctccttgtcttcggagacggcgcgcatggccttgccctgcctggtgaatttgacgaacagctgcaggcccaccatgatgaccaggccgatgacgatggtcagcagggtgtctcccggcagcttgagcttgccgaacgcgatggacggcaggtggaagatggtcgggacggtctggaagtcggcgccgaagatggcctgtgagccgttctccagcagcaacgacatggcgatggcggtgatcagggcggtcatggagttgcccttttcacgcaccggcttataggcggccttttcgacgatcacgccgacggccacgcataccaggatggcgggaatgaccgccacccaggcgggcagtcccatggccacgatggccggaatggtgagcatgagcacgtaggctccgaccatgatgaaatcgccgtgggcaaagttgatcagtcggatgatgccgtagaccatggtgtagcccaatgccaccagcgcgtacacgctgccgattttcagaccgttgaacagctggctgatgaacatgatgatctgatcggtcatagctccccctttctatcaatgttgtggttctctaccgctgcgcgcgtagagatattcgtatgtcttgcgattgatggcgcgatacgcccgcgcctggcgatatccgcatatcgacggctgtccttatgcatccgagcccatgaaaacacgaaagggagaggaccggcaaaaccggtcgctctcctgttcatgcggaagtcatgctaggacatcgtgattatgcggtgggaattcatggaattcacttgggctgcacggtggtgttgtacaccggcttgccgtccttcatttccagcacggtcacggacttggtcggcgagccggacttgtccatggtgaacttgccggtcacaccgtcgaaggtcatgccggccacggcgttgcgcacatcctcacgggtggcgttctcgccagccttctcgatggcctgcttgatcatgtagatggtgtcgtagcccagagcggcgaacgtgttcggctcggcgttgttcttggacttgtaggacttgatgaagtcctgcaccttggtgttggtgttgtcgtcggcggagtagtgggtggtgtagtaggtcttgttgtactgggacttgtcaccggtgagcttgaggccatcgtatccgtcgggtcccatcacgtagccctcgaaacccacggagcgggcctgcgggatgatgtacgggccagccacggagtagtagtacggagcgtagagcagctcggcgccggaagcctggatcttctgcagctgggcggagtactcggtgtcgtcggcggaggaggagctttccttgtccaccacttcgaggccgagcttttcggcggccttggcgaaggcctctcccacgccggaggagtacggatcgccggtgccgtagagcacggccaccttcttgaccttcaggttctcggcggcgaagcgtgcagccacctcaccctggtaggagtccttgaagcaggtgcggaacaggtaattgccggtttcgatggagtcggaggtggcggccggggcgatggtgaccagcttggactggtcggccagcggggccacggctgcggtggtggcggaaatggtcgggccggccacggcgagcacgttgttgtcgccggcgagcttgttgtaggcgttggaggcttcggtggcgtcgcccttgtcgtccatggactcgagcttgaccttcttgccgttgatgccgcccttggcgttgatctcggagaccgccagctcgaagcccttgacctcggcctcgccgtaagcggcggcggtaccggagttggtggtcacggtgccgatggtgatggagtcgccggaggccttggcactggagctggaggaatcatccatgctgccgccggagcagcccgcgagggacaacgccataacagcggccgcgctggccgcaacgaacttagtggagaacttcacgttcatcctcttccttcttccttgggatatttcaacatcgttcatctgtcaaccaacgcgcgggatgtgcgcgtgagatgttccactcacataattcgcataccacagaactacatcacacggcttgtgaccgtcattcacgtctctctcatccgatgtttgtcgcggactgttataaccagaccggctttgaacccgcaataaattgttcttattatgagacagcgcaattacggaaacgagaatacaatcccaaggaaatgtgggattcgtggggcttaggacactgcaaacaggtagcggtcgcgacccgtccagtcctggccggtcgatgcggcagcgaatccggtggccctggcaaaggccacgagacgatccccctgggtcacgtcatgttccatgacaagcacgcccccaggcttgagaagacggcaggcccgctcgataatgcgctcgggaatcaacgtaccgtccatcgagccgccatacaaagccaattccggatcccaatcacgcacttccggctgctcgggaatatcggtctgcggcacgtaggggggattggtgatgacgatatcgacggtgccgtccaattgggccaatgtggcgaaggacgtggcatccgcgatttccagatggtaattcgaggcaatggatgggtactttttcgcggtttccgacagattccttcgcgtccattcggcggtgttcggcgacagctccaccgcccacacctggctgccgggcacctcgctgacaacggacagcccaatcgcgccggagccggcgcacaaatcgaccacacaaggatggatcatgccgttttttgtcagccagtcaaggccggcctgcaccacggtttcggtttccggacgaggaatgaacactccgggaccgaccttcaggtcaaggtagcggaaaggagcgtgcccggtgatgtattgcagcggctcgcgcttggcacggcggtcgagcatggcacggaagacggcaagctgtccggttgtgccaagttcctcccccataagcagagccctgtcgacgtcgcgcagttcaacgcctgccgcctcggcaaggagcaacttggcatcatgctcaggcgtctcaacacccgcttcgcgcaattgcgaagaggcttggttgatgatgtcggtaataagcactggcggtctccgttgatcggacattaggctcccctcagtcagcttcgctgacagctcccctcacagaggggagccatccggcaaagtcatttctgattggccagacggtcggcctcgtcggcttggatgtcggaatcgatgacggcctgcaggtcgccgtcgagcacggcgtcaaggttgtaagccttgtaattcgtgcgatggtcgacgatacggttttccgggaagttgtatgtgcggattcgctcggagcgatcaagcgaacgtacctgcgagtgacgcatgtcggcggcctcggcggcctcctgctcatgcttcatggccagcaggcgggacttcagtacgcgcaacgcggcggcacggttctgaatctgcgacttctcatcctgcatgttcaccgtgattccggttggcaggtgggtcatgcgcacggcggaatacgtggtgttcacggactggccgccggggccggagctcatgaagatgtcgattttcaggtctttcggatcgatctcgatctcgtcgtcatcctcgtcggcctcggggaacacgatgacgccggcagcggaagtctggatacggccctgcgattcggtgacggggatgcgctgcacacggtgtacgccgccctcgtacttcatcgaagcccacacgccgtcttcgggagcgggcgtgcccttggcgcggatggcgatctgcacgtccttgacgccgccgagctcggtggtgttctcggactgcacgttcacgctccagccacgcttctcggcgtaacgggtgtacatgcgcagcaggtcgccggcgaacagtgcggcttcctcgccgccggtgccggccttgatctccatgatggtgtcgcgcgcatcatccgggtcacgcgggatcagcgcggtgcgcagcttctcctcgacaccgggcagttcgtcttcaagacgcttggcttcctcggcgaagtcggcgtcctcgccggccatctcctgagcggctgccagatcgtccttcacctgcaaccaggctttgtaggcacccacgatggcacccagttcggcgtgacgacgacccagcttgcgcagcttgtccgggttggacacgacttcggggcttgccatctgttcttcgatggactggtactcctcaagcgcggttgccgccgccgggaactgttcgtctgccataacacactttcttctgtatggtgctgttctgttcgattattcgattgcgcaggtcaatgctgcaacaaaacttgtcaaagaatacaaaaaacgccagtcctcgatcgggtatgccggagcatgccaaatcgaatcggactggcgtgaagtatgctacttgctcttcttgccgtagcgcttctcgaagcgagcaacgcggccaccggtgtcaagaatcttctgcttgccggtgtagaacgggtggcactgagagcacacgtcaacgaacatgtgatcttccttgccagcggtgcgggtcacgaaggtgttgccgcacgagcacgtcacctcaacggggtgataatcaggatggataccctgctgcattttacgtctcctatggattcgggggacccgggtcgtcatgcccctatggcaagacgtgaaccggaacctaagggattgtacgcgcctatctggacgtgaagacgcgctgcgccgccgcaggagacgacgcaaaagagtggggccgcaggggcttgaaccctggaccgggcgattatgagtcgcatgctctaaccgactgagctacggccccacgttcgctgcgtaaaacagccaacttgccaaagtgtagcacgagcccgctaatgccggcacgcgcgccatgcacccataccatgcacccgccagcaacaagcagcatctcccggcgctacttctcccccatgtaccccaacgggttctcgatgaaccgtcgcaagcccatttcggccgcgccatatagcgagggatgcagcgccaccggcggcacaaacacgcgaatcttcacattcgggtatcccagaatttccgaacgcagccggccttcaagcacggtggccagctcgtcgccgaagtgcgtccacagtccgcccaacagcaccgtatcgacatccaccagattcacggcggaagcgatggcggaaaccagcgcatcggcggcctgatcgaccactttggccacatccgaatccccggctcgccaacgctggaggaacatatcgatggcctcgctgctggtggcatccccatcctcggcaatgccggcagcctcgaccaaagcgcgacggcccgcaaacgcctcaagacacccgtgacgcccgcagctgcacaacggcccatccatcgccacggacagatggccgatctcgccggcgaatccgtgcgagcccatcaccacttcgccgtcgcgcaccaccgcgccgccgatgccgatatcggtagacaggtaaataaaggagtccgtgcggtccaccacattcaggaagggcgcacgttcggtggcataccccggaatctgagcgatggcggccatcttcgcctcattgccggccaccacatccagccggcgcaccacgttgaaccgggtgaggttgacgttttcccaacccagattgcgggccaccaacagccacatgtcgtcggtgacgatgcccggcagcgcaaacccggctcccaccaccttgcagccgcgtcgtttgagccggctttccaacgggaaagtcatcgcatcgagcttggcgaagatctcgtacgggtcagtgccggtcatatcctcactcacccactcccggccgagagtgtcgccgttcagatcgagtgccaggcaaccgtaaccatcggtgttgatctgcaggccgatgccggcgatggatccgccgcgaatctccagcggcgtgctgggccgcccatatgtggtggaaacgaccggctcgccttcctgcaccacgccgctttcaatgagcatcgaggccaacagcgagagcgtggccttggtcaggcccgtctccttggccagatcggcacgactcatcggtttctgcgcacgcaataaggtgtcgagcgtcaccgacaggttatggttgcgcagatcctcctgattgatcctgcgtagatttgccattggcccctacctcctcgcacccctagtctcgagcgccgcacaggcgctcacatccgtctatcacaccatgatattgtgcgtcaaacgattgaatcggaccgcaccttcgcgtgtttccgtttgcaatcgaacgttgagatacagtatagtttaatcgtctaacttattggctatggcgcgccgaaacttttgagcgcgaccctcatcgaggaggaatgcatgacgagagtactggttgccggcgtagatacgtcaacccaatcaacgaaggtccgcatcacggacgccgccaccggcgaacaggttcggttcgggcaggccaagcacccggatggcacctcggtcaacccggaattctggtgggaggccttcaccaaggccgccgagcaggccggcgggcttgacgatgtcgcggccctcgcggttggcggccagcagcatggcatggtcattctcgacaagcagggcaacgtgattcgcgatgcgatgctctggaatgacaccagttccgccccgcaggccgccgccttgatcgacaagctcggtgcagctccggccgagggcgacgaaccggacgacgtgaccgcccgcggcaagcaacgctgggtcaaggccgtcggatcctcccccgtcgcctcctacacgctgaccaaggtggcgtgggtggccgagaacgagcctgagaacgccaagaagattgccgccgtctgtctgccgcacgattggctgagctggcgtatcgccggctatggcccggtggccgagggcgaggacgctcatctcgaagccctgttcaccgaccgttccgacgcttccggcaccatttactacgatgccgcgcatgacgagtaccgccgcgatctcatcgccatggtgctggcccctgccgagggcgaggaagccgccaaggcccacgccgacgccattgtgctgcccaccgtgctgggcccgcgtgaggcagccgccgtcaaggccgaccccgccattgccggcaaggacgttgaaggcggctgcatcatcggccccggcggcggagacaatgccatggcctcgctgggcctcggcatggccgtgggcgatgtgtccgtatcgctcggcacttccggcgtggccgcggccatcgctgaaaacccggtgtacgacctgaccggcgccatttccggctttgccgactgcaccggccactatctgccgctcgcctgcacaatcaacggttcgcgcattctggacgccggtcgcgccgccctaggcgtggactacgacgaactggccgaactggcgttcaaggccgagccgggtgccggcggcatcaccctggtgccgtacttcgacggcgagcgtacgccgaaccgtccggacgccaccgcctcgctgactggcctgaccctacacaacaccaccaaggagaatctggcccgtgcgttcgtcgaaggcctgctgtgttcccagcgcgactgcctcgagctgattcgctcgctgggcgccgagatcaaccgcatcctgctcattggtggcggcgcgaagtccgtggccatccgcacgctggccccctcaatcctcggcatggacgtgacccgtccggccaccgacgaatacgtggccatcggcgccgcccgtcaggccgcctgggcgctgtccggcgaggccgaaccgccgacctggcagctcaccatcgagggcgtggagaccggcgagcccaccgaagccgtgtacgaggcgtacgccaaggcccgcggctgatacgctgccagcaaatccatgagataacaactgaataacgattcctgatgaatgccgccatggcgagcatcgcgaagagccgctgttataccgcgctcctcgctgaagcacacatggcggcatttttcgtttcccacgcaatccacaaatacggctataatcaagtcgtttgaacaagtctggagattcttctatgaacgaccgttcccgtatgatgctgtacgccctgaccgccgtcgcatgcgtgatttggatatggcaatccgccaaagaagcaatggccgatggcacgatgatcagcacctcaaacatcatctttttggtatgcatcggcattgccgccgtctactgcgccgccaacgcattgatattgtggtggcgtcaacccagcaaggaggatgcggagaacgatgacgccgcggatacgcctgacggtaccgataccgacaccgcagatgccgagggatccgaggacgacaccgatgacgatgtcgaaaccgacgtcgcaaccacggatgccgatgcatcaccaaccactaatcgccagtaaccatcgttatcgttcgcccgaatcaagcgaatcatcccacttcagcaaaggaacattatggaagtaacaaccgtgtcaaccgtgatcagcgtggtgctgggcgtcatatgcgcgccttgcggcctgtttctggggctcgttcccatgaaggccggcctggtgaccgccaagcagtcaaaggcctcgcagatggtgagcttcatcgttgccatagtgttcatcggcttgctggtcgcaggacatgatctggagacctgggccatggtaatcggtctggtcatcggcttcgccgttgccaagattcccgcgctgcatgcctgggctttgcacaagtggccgttcttcgagcccaagaaagcggctcccgctcccaagcgcgtcaagaaagccaagaagaagtaagctctggccttacctattcgctgaaagcgggatatcgacatcggtatcccgctttttcattggccgtacatatccgctgaggcacatcgccgaatcatattgtcgaaatacaccccaagtcagggctgatttcgcgaagaacgtacaccgggatccatccatcgcgacaaacggaaaagggacgctgcgtgcaacagcgtccctttcggaggaggaatggaactcaggtccatccccgtggccaccgggcgggcccggaggccaggtttagctcagcctttctttttcttggagagcaggtcgtaggcgacggcggcgatgacgacgaggcccttgatggtcttgacccaggcggcgtccacgcccatgatggacaggccctggttgagcacgcccatgatcagggcgccgaccatggcgccggggatggtgccgatgccgccggtgacggccgtgccgccgatgaagcaggccgcgatggcgtccatctcgaactcatgccgggcctgtctcgttaagtgtgtaactggcgttttcattgttgtgttccctcgcttggccagcggtcggcgaaggtgatggcaaaggcgttgagcgcgggcttccagcgcgcgctccatcgtatccgtcccttgccggtggggtccagcgagcggacggtcaggtacatgcacttgagcgcggcctgctcgtcggggaagtggccgcgggcgcggatggagcgcttgaatctcgcgttgagcgattcgatggcgttggtcgtgcagatcacgcgccggatctccacgtcatagtccaggaacggtatgaaccgttcccacgcgtccatccacagcctgcggatcgcgggatatctcgcctcccacttgtccagcatcgcgtcgcgggccgccgccgcggcggcggcgctcggcgcggtgtagatgggtttgacatcgcgtttgatggcgtcccagtccttcttcgacgcgtagcggaacgtgttgcgcagcagatgcaccacgcaggtctgcacgatggccagaggccataccgcgcccaccgcgtcgggcaggcctttgagcccgtcgcagatcaggaagaacacatcgtccacgccccggttcttcagctcggtgagcaccgacagccaatagcgtgcgccctccgcggcgggcgacgcccagatgcccagcacgtcgcggccgccctccagatccacgccaacggccacgtagaacgcgcggttggcgacctgcccgtcgcgcaccttgacgacggtcgcgtcgatgaacacggccgcgtacacacgatccaggggacgcgagcaccattcgtccttctcggccacgacccgctcggtgatgcgactgacggtctccctggacacgtccgccccgtagatctcctggaagtgggcgctgatctcgccggtggtcaggcccctggcatacagggacagcaccacctcgtccaccccgggcagccgccgctgccgtttcctgacgacgaccggctcgaacgagccatcgcggtctcgcggcacctcgatcccgaccggacctaccgaatcggtgaccacggtcttggcggtggtgccgttgcgcgtgttcgcggccctgccgtccttggatttcttgtgcttggcgcggcccaggtgctcggtcatctcctcgtccagggccgtctccagcacgcttttggtgaactgtttgagcagtccgtcgggccctgtcaggtccagtcctttttccttggccatgcgcacgaatgtgagcgccgcctcccgctcggcgttgcgtttttccgcgtccggcttcttcgtcggtgtcatgtttccccttgtcccagcagacatcgtccaccagcctttccgaccggccacacgaccggccagttaaggccagttacacacttcgagagacagtcccgttttcagcggaaggagagaaaggagaaagaaggaatggaaaggtgccatgcgggcataacacaacaccgcacatggcgaaactatcgaatcagcccatcgggcgcactggcatcataattgatgtgtacacgcccgatggagcgaattcaatcggtcagaccgatggtcactcgacctcagccagggcatcaatgatgtagttgttgatggtggccttgacagactcgaggtgatcggacttggtggcggcgatgagctcggactgcggcttgtcgaggctgtaggcttcgaggtcggccaaggtgacgttgccctcgtcgatgtccttgccgatgccggagtcgtaggagctgtagcgctcggcctgaagattctggatgaagccgtcctggttcatcttgtcggcaaccagcaggccggcggcgtaggtgtccatgccggcgatgtgggagcggaacaggtcctcctcgtagaaggaggtacggcgcggcttggcgtcgaagttcagaccaccgtgaggtccgatggagccggcctgcaggacttcccacatgacggcgacggtctcgtacaggtcggtcgggaactcgtccatatcccagccgatgagcttgtcgccctggttggcgtcgagggagccgaggaagccggattcgcgggccacgcggatctcgtgctggtaggtgtggccggccaggttggcgtggttgccttccaggttcagcttgaagacgtcagtcaggtcgtggttgcgcaggaactcgatggcggtggcggcatcgaagtcgtactggtgcagcgtcggctccttcggcttcggttcgatcaggaactgggcctcaaagccgatttccttggcgtagtcggcgcacatgtggaagaacttggcgatgtggtcggtctcgcgcttcatctcggtgttccacaggttctcgtagccttcgcggccaccccagaacacgtagttctcggcgcccaggcgcttgccgatctccaggctcttcttgagctggccgccggcgtaggcgtagatgtcggcgaacggggaggtggcggcgccggacacgaagcgcgggttggtaaacagggaggaggtgttccacagcagcttgacgccggtggacttcatgttctcctcgatcttgtcgacgaccttgtcgaggttggcgttggtctcgcgcagggtgtcgccttcgggggcgatgtcacgatcatggaagcagaagtactcaacacccagcttctggaacagctcgaaggcgtagtcgaccttggccagagcctggtccatcggatcggtgtacttgtagtacgggcggtgcgcggtgccggtgccgaacggatcaaccagttcctggttgaaggtgtgccaccaagcgacgccgaagcgcagccaatccttcatcttcttgccggcaacgaccttgtcggcatcgtagtaatggaaggcgaagtcttccttcggccccttggcgcggccgacgtactcgatcttgtcaacatcccacagacccatttgggcgctcctttgcagtaggcgatattacggattgcaggactaataataaaacgaacgaactaagtttgtcaaatgaatgaattaatacgccgtgtctcagcgtgttgccaatcatcgcaatggttttcgaatgcagtcaaggcacagatagtatgggcaagccaagaaaacgaggctcgataattgacgtcacgcaattcctcgccggccaccgctgaggccggctccatcacccccgccaactccaacagcaccacccctgccaacaccaccgctatgatcatcaccctgatgatcggctcgtttgtggccattctcaaccagacgctgatgatttccgcactgcccacgttgatgcatgaattcgatgtgcccagcagcaccgtgcaatggctgaccaccggattcatgctcaccaacggcatcatgatcccgatcaccgcgttcctcatcgagaccttcaccacgcgccagctgttcccgtacgcgatgggcatatttgcagaatgatcttggcgataatgcactggtgtccggtctggtgatgatgccgagcgacatcgccatgggcatcctgaacccggtggcaggcaagatgtatgaccgtatcggtggccggccgctcgccttgctgggcttcgcgatcatgacgtttgcggctgtgctgctggtcaccatcatgaacacgcacaccgcggcggccatgcgaaccggagtgccggaagcggcggcatcggccattggagtgcgggcttcgttccgcacggtcgccattgtgtgcgcggtctgtttggttgcgtcactcttcattcgtgatcgcggccgccgacttggacagcagcgttaggcgaatccttcaccgattgctggccttcttgatcagcgcgtccaaagtaccggcttggcgcgcggcttccacatcttcccagtcgagaccggtgtctttggccctcccgtagaaaaaccgcaccagaccggcaaagtccggtttatatccggtttcccggaatgaacgggccagcgaatcaccgatttgcgggtcatcaggccttcgtgcctcatagatcgggatggaacaggatcgccacacgcctctcacatgtgcgatgcgattgacgatcatgccgccgtgcgcaccatcgtattgcgaggcggcatgtacgtccgccacctcgtagacaccaccatgaatgatgtcctcaactgtcagacgacctttgaccgcgctggcatcgcgaatccagaacatcgaagcgaaattggtgtcatcaagttcgcgaaaatcacgtatctcgcgtgtgccgatacgttcgtccttgtcatacatgaattcggccaaggctaggaatggcgagatacctgcgcccggaccgtactgcaattcgatacgtaaatcttcggattcattgccggtcagtccaataccgctgacggcgcagtcataggcaaaccaatcccagaaccaccattcgatcctttgcagcacctgcttcggatactttttgcatgggttcagattcacttcgcgataatatatgcgtctcgcttcggcatagacggcgagattgcagcgtttgaacatctcggctacgtctttggtgtccagcattgctggcaaaccggcattttcggcagtagtagtgattgcggtgctcatggtgtttccccttcatgtgatgtggacggcgggctacgttgcccgccgtgaggcacactgtatgacgttcgtgcggtggctcgcaagcccacatggcgagatggtggataagtggaaaacccaatgattccaaggggtatggaatgtgcataacagtggctaccgtcggtggataaccgcactttcttgcaggttatccactgatcgcgcagctgttatccaccgtctctgggttatccacatcgtctctggcgtgtcgtccactgtcagcagtcgatttctgcttcgtttggcgtgtataagtgcacggtgaagtgtataactccgcgcattaggcatatttgctactgagaaaggtcccgaaatcgccttcgaacgcatagctacactcagcagatgtattcagcatggcaatagacccacttaggcaccggcgaatgattttccctcgcttatagagtcggcaaaggcccaacacctgtcccaacgccgacgctactgcactggcagcgtcggcagaggaccacaacttggcacagcaacgacgctaaaaccgcccagcatcgttacacgtccaagttttggccgctaacgacgcttaatgaacgcttagcgtcggcagcaggtcacgcactggttctccaccgacggtagcgctccttagcgaagccagcccgccactctttggcacatcaccgacgctgagagaacctccagcgaagccaaccagccaaccgctggcgacatgacaccacccacacccctcagcgaagccaacctgccagcgcatggcaccccaacaccgatgagaacacccaccccaccagtgcacaaaaaggctggtcatagcggttgcgatgtaatcgcatcgtaatcgcgatgaccagcctcgggagttgggctgcaatgagcaccgatatgaatcagataatgatgccgttgcagtgatcgacttcatgctggataatctgcgcagtccaaccggcgaaggtggcgtggcgggcgcggaaccgacggttctcgtagttgacctcaatacgtcgataacgcagcgtgcggcgttcgccggtcagggacaggcatccttcctgggtatcgaaggcaccgtccgaagcggtaatcacggggttgagcatcaccgttatgcgcccgccaaggtcttcatccacaaagacgatgatgcgtttgcctacgccaatcatgttggcggccatgcccacgcaccgtgaacggttggcctccagcgtgtctacgaggtcttcgatcacctgctcgtcgccgggcccagccgcttcagacggcgtgcgcaaaaacgaccgcgaagtcataatagggcgttgcatgttggaatcacgcttcttcgtgccagtgggggttctggccgaaggtgtggccttcggggttgtccatcgcggcgatatcggccatgtcctgatcatcgagctcaaaagcggtcaggtcaaggttctggcgctggcgttccgggttcagggacttcgggatggccacgtcgccgtattggaggtgccagcgcaaaatggcctggaccacggaaataccgtgcttggcggcgatgcgcttcagatccggatcgcgcagcatctggttggcccggcccagcgggctccatgcctcggtgatgatgccgtgcgcattgtcgtaggacagctgttcgcgctgctggaagtacgggtgcagctcgacctggttgacggccggcgtcacacctgtatcgcgaatgagcaggtcgatgtggccgggcaggaagttgctgacgccaatgtgcttgaccaagccgcgttcgcgagcttcgaccagcgcttcccatgcctcgacgaactggccttggcttgggttcggccagtgaatcagatagagatcgatgtagtcgaggcccatacggcacacgctctcctcaatggtgagcagcgcctcgtcgtgagcatggtggcggccgggcagcttggacgtgacgatgatgtcttcgcgcggcacgccggattcgcggatggcgcgacccaccacaccttcgttctcatagttgaacgcggagtcgatgaggcggtaaccctgatggatggcggacttgatggcgtccacaccggctaggccgttgaccttgtacgtaccgaagccggtggcgggcagttcgaggccgtcgttggccttgcggatcggagtgaccggtggttcatcaagcatgatagttctcctgcttctcctgtgatggcatatctgttccatcataaagccaaccaatccgctgcgggcatactatttgacttcccccatttccggcgggtggtgagccactgcaccaccgaagcgccgatggagaactcctccatcagcgtggagtaggcgatgttcagtgaggtttccgacaggatgccgaggaaggtcagaatcgcaagcgagacgaccgcgatgacgagcttgccggaaaagggttgtttgccgccgtgaggtagttgtgttgctgaatcagtcataatcgttgctctcctccattcattcacatgcttttgcgatgctgcgcgtcttcctgcataagccgcagggcttcggtcaatgtgcgcacagtggtttcgcattgttccacggtcagcccgcccaatagctggctaagatgcgcatggtattcctctacgtaaacgcggcggatatctagtccacgctcggtgagcgtgagcgtcaccgcacgccgatcggcggcatccatatgcttgaccaccagaccaagctccaccatctcgccaacgagtttggtaacgctcggcgtagtgacgccgagaaaggcgctgacatcgcttacccgtgcggtgccgatttcctgcccattcgtttcgttgatatgccagacggcatcaatgacgtgtacgtagcgcggtttcaggcctttgggcagtgccggcatcagctcggtgatagccttcgctttccagcagacatccaggaggctccgcacctcattcaccggaagcaagccggtcttggtatcggttcgggaatcgcacatcgctggcccaacctccaattagttaccaatagtcattaccataagtaactatatgcaggctctagacaaacccaacggcctgcgcgcccgtgtcgagttccgtttcgacataaaaaagccagggaatccctggcttgcaatgcacatatcgctgcagatttgccgggacctatatgtccccggcaacaacagccgtatatacgctaccgatcagtgctgccctcatcatccttggcacctgccgtggcggcctcagtctccttggcgttccacccggcgacggcattccaaccactccatccgatgaccactagcaagcacagcgagaagacaatagtggcccaattgaacagcgagccatcgttattggcctcgaccagtgactgccagagccagataacgcaggccaagcaggtcaatgcatacatacgggaggtggagcgcgcggtgagtttcatggcggaaaaagtcctttgattacaagaatgacggcagataacagtgtgggatccgcaccagcggcaccggcacgaatcccacatcgaggaggagaaaggggaaggtcagctcttcttgcgcttggacatgatgtccacggcgacggccagcaggagcacgaggcccttgatggtcttcaccacggcggtgtcaacacccatgatcgacagaccctggttgataacacccatcacgaatgcaccgatcacagcgcccgggatggtaccaataccaccggtaacggccgtgccaccgatgaagcaggcggcgatggcgtccatctcgaactccataccggcctgagcagttgcggaagccagacgggagagcatgcagacagcggccactgcggacaggaagcccatgtggacgaacagcaggaagtccacgcggcgggtgttgataccggagaggatggcggccttgcggttgccaccaacggcgtacacgtggcgaccgaacacggtcttggtcaggatgaagttgtagatgaagaccagcacaccgacgatcaccagcatgatcggggtaccaccctgatcagcgttaccggaggaagccagcaggtaggtgacgaaggcgatgacgaccgcggcaagcacaattttgaggacggtcaggctcatcggctcgggcaccaggccgaccttggccacacgggcgcgcttgcgcagctggctccaggcaaagccgacgatgcacaggatgccgagcacaatggtcagaccatcgaacggaccccaccagccaaggatgttgggcaggtagttacgggcaatgccacggaattcgagggaggtaatcggcacggattcgccgacgatcacggtggcgagaccacggaagatcaacatgccggccagagtggtaatgaagcccgggatgccgatgacggcgacccagaagccctgccagacgccgacgatcaggccgacgaccagagcgatgacgatggcgagcatccagttgactccggcgcgttccatcagcagtgcacacacaccaccgatgaaggctaccaaggaaccaaccgaaaggtcgatgtgggtggcgatgatgaccatcaccataccaatggccaggatgatcacgtaagcgttctgctgaatcagggacacgaaggagttcggcttcagcagcacgcctccggtcaggacctcgaaggccacgacgatgaccagcagtgcgccgacaataccgtattgacgggcattgttggcaaccgtggccagcaggccggtcttttcttctttctttgcaggtgttgcagttgcggcgctcatcaggctgccacctccctttccttggtcatacccttcatcaggtattcctgggtaaatccattcttctcaacattgtcggtgacgacaccgtaggacaccgtgtaaatgcggtcacagataccgatgagctcgggcagctcggaggaaatcacgatgacggccttgcctgcatcggcaagcttatcgatgatttcgtagatctcatacttggcgccgacgtcgatgcctcgggtcggctcatcgaggatgaggatgtccggctgcgagataacccacttggcgagcagcactttctgctggttaccaccggagagggtggagacattcacatcgatgtcatggcacttgatgttgaagtccttgcggtactgttcaacttccttgcgctcaaggttgtcgtccacaaccccgcccttgctgatcttggtcagggaggccagggacgcgttctctcggatgttctgcagcaggttcagaccgttgcccttacgatcctcggtggcgtaggcgagacctgcgtcaatcgcggactgcacgttgggcatcttgacttccttgcccttgacgaacaccttgccggagatgttggaaccgtaagagtggccgaagatggacatggccatctcggtacgacccgcacccatcagacccgccagaccgacgatctcgccggcatgcacgttgatgttcgcatggtctacgatcacgcgctccgcgtcgagcggatgatgcacggtccaatcctcgacacgcaggtattcctcgcccggggtattggaggggtggttcgggtacaggttgtgcagcggacgacccaccatcttgcggatgagttcttcctggtcgagcggcgtctccggcgtcacgtacatcacaccgacggtcgaaccgtctcgaatgatggtgacattgtcggcgatggcggcgacctcgttgagtttatgagtgatgatgatgctggtcacgccctgctcgtcacgtagctgacgaaccaggtcaagcaggtgggcggaatcctcatcgttcagtgcagcggtcggctcatcgaggatgagcagcttcacgtccttggacaatgccttggcgatttcgacgagctgctgcttgccgacgccgatgtccataaccttggtatccgggtcttcgggaagtcccacacgatcgagcagcttcttcgcctcggcacgggtcttgtcccagtcgattacgccacccttggcctgctcgttgccgatgaagatgttctccgcaatggacaggaacgggctcaacgccagttcctgatgaatgattacgatgccgtcggcctcggaatcattaatagtatggtatttgcattccttgccatcaaaggtgattttgccggaatagctaccgtatgggtacacacccgaaagcacgttcatcagggtcgatttacctgcaccgttctcgccgcagatggcgtggatctcgccgcgatcgacggaaagattcacatcggtgagggctttgaccggaccgaacgtcttcgtgatgttttccatcgtcaagatggtgtcatttgatgacatgtcaccactcctcgtcacagttctgtgttcatggacatgcggcgcatatcggctatgcgccgcatgtcattgtgtttgtttacggattgcctgatgaggactacttagtcagctcgtcgaagcgatcctgggtgatgtagttggccgtgaccagatcctggaggttgtccttggtgatgttctgggggtcaagcagcttggacgggacgtcgatgttgttgttgttgaacttgccgttcaggccggagacttccttgccctcggcgatctcgacgaccatgtcgtacacggcgtcagccagcttgttcacgtccttgaacacggtctcgccctgcttatccttggcgatgttggcaactgcgatctccatggcgtcctgaccggtgatgtacggccaggagtcggtgcccggcttcatgtcgggacgcttggattcgatggcgttgatcacaccctgggcgatgccgtcgtacggagtgaggaccgcgtcgagcttctcgccgtgggcgtaggtggagtcaaggatggattccatgtccttctgcgcctgctcggtcttccagctcatcacggagatcttctgccaatcctcaacggtgaagtccttggtcacgccaccctgaccgtgctgggacggggagacgagcacgcccttctcgaagtacggctgcagcagatcccaagcgcccttgaagaagtacttggcgttgttgtcatccggggaaccggtgaacagctcgatattgaacgggccggtggcgccatccttaagcttgagctggtcaatgagccacgtggcctcgagcacgccgacctgctccagctggaaggtggcgtagtagtcgacggcgtcggtgttcatgatcagtcgatcgtaggcgatgaccttggcgcctgcatcgcgggccttctcaacggcggggcccactgcggtgccgtccttggaagcgaccacgacgatcttggcgtcgttgttgaccatgttctcgatgtcagcgttctgctgggccggcttatcgtcggcgaaggacaggatgaccttgtatccggccttctccagcttggccttcaggttgttgccgtccttgttccaacgctcttcggacttggtcggcatcgaaatgccgatagtggcgcccttttcgatcttggcatcaccgccagttgcctggccgctacggctgccaccgcaggccgcgaggcccgcgcacatggcaacgcctgccaccacggcgacgatcttcttagtgaacttcatttgttctccttcatcttcgaggggatggcgaaccctccttggtcgcccgaacctgggaataacctcaggttcatctcatagaataccgtattgagttaagttgtcaaactcaagaaagcgaatttcctgtcgtttatgttcaaccaatgaacgcaatggcgatttttcgcgcatcacaaggcgacacgccgaaaaatccacgctctgcgcctcgctgtgcctcatgctggtaacgactacactgaactcttatggcaacaaggcttttcggttcgcagacctcgcttcgcgaggcaaaccgcgccaacttgctggccagcatccacaagttcggcgccatgacacaggtcgaactcgcagaggtgacaggactgtccactgcgaccgtgtccacgctcgtccatcagctcgtcgacgaagaccagctggagaccaaaagcaccgttcgcaacggtcgcagagccactctggtgacccttgcacggcatcagggcctcggcgtcgggctttggatcgcgcgacgtcatcttacgctttccatcgttgacttctcgaagtcaatcatcgctgagcacacgctccccctgccgttgggccacaaggcggacacaacgctggaacgcgccatgctgctcatcaatgagaccctgagcagcatcgacgccgaagccagcgagctggtcggcatcggcgtggccgtggccgcaccggtggccaccagcgaccacaccatagcgattcccggcattctgcccggatgggacggcgtcgatatcacgtccccgttgcgcacggcgttcaacgttcccgtatacgtcgataatgacgcgaatttcgcggcatacggcgaatcccgtatgggcgtggcggcaggcaaacgcaatttcgtatatatctcagccagcgacggggttggcgcaggcatcgtcatcaacggcgaaatcatgcatggcgtgaccggcctggccggtgaaatcggccatatccaggtcgacccgctgggtgccatctgttcgtgcggcaaccgcggctgccttgacaccgtcgtggcggaaaacaggctggtgcagttgctcagcgtcacacacggcaatatgacgctggatgatctggtgtcctttgccaacgaaggcgaccccggttgccgtcgcatcatcgccgacgcggccgtgcgtatcggtcaggtggcggctgatctgtgcatcagcgtggatccggaggtcattgtgctcggcggcaagctggccatgaccggcgacgtattcatccaaccgttcaatgaagcgttgcagcgcatgctgttccctgatgccgtggcacccatcgatgtactcgtgtcatcccacccggacgacaattgcgcgctaggcggcgcattatgcgccatcgagttctcggttcgcaatgacgtcagccagtgaccggtaccaggagaagagtgataagaaggaacacaccatgaggaattcgagcacacctcctctgctgcggctggaggacatctgtgtgaagttcggcttcgtcgaggcgttgaaatcggtgaatctgtccatccagcgccaggaggtcatcgccatcgtgggcgataacggcgcaggaaagtccactctgatcaaggtcatcgcgggatttctgcagccgggattcggccatatttatctcaacggcgaacaggtgaccattccctcgatcagggaggcggaccgcatgggcatcgcatcggtgttccaggggcaggagttctgcgacaacctggacgtggcctcgaacctgttcctcggcaaggagatcaatcagattggcatacgcgatgacgattcgatgaactcgcgtgcccgttccgtgctgaagaccctgagctcggcgattcgggtcggctcccctatcgcatccttatccgtcggccagcgccagaccgtggccatagcgcgcacgctgctcaatgacccgcagcttattctgctggacgaaccgaccgccgcactgtcggtgatgcagtcggcggaagtgctcgcatatatcaagcgactgcgctccgaaggccggtccgtggtgatggtctgccacgatctgccggatgtgttcgcggtatccgaccgcattgtcgtgatacgtcaggggcacgtcaccggcgtgcatcgaaccgtcgaaacgtcctatgaggagattatcgccgaaatcgccggcgtgaccaccgaacacgagtatgaggaaatcgccgagaacccgaaattcgattccatggtcaggcagcggaaactcatcgaccgcactatcagcgcggcagtgagccatggcaccggccatgactcaccattagactaacgccccgttgccggagcggcatcgtcagcgcagagccaggttggcggcaccgatgaggccggcgtcttggccggcggtggcggcgacgatcttggcatggccgcggtaggcgctgccttccaggaaacgctggtagttgtagcgggccggctccagcagaatgtcgccgacggccaccacaccgccgccgatcacaaacaggtccggatcgagcacggcggagactgcggccatcgtgcggccaagccattcgccgatcttgccgaatgcgtacaggccgagcacgtcgccttcctgggcggcctgggagaccatcgggccttccagcttggagatgtcgccgccacacagctccatgagacgcttggcatcctgcggacgacggcgcacggcggacttggcgaagttctccagcgaagtgcccgaggtgtagcgctcggcgcagccgcgcaggccgcagccgcagtggtcgccgtccgggaccatcggcaggtggccgagttcggcggccatgccgaaggagccgcggtacagctgaccgttgatcacgatggcgccgccgaggccggtgcccacggtcagggcgaccatgttggagctgccctggccggcaccgtgcacgtattcgccccagccggcgcagttggcgtcgttctcgacaacgaccggcacggcatggtcgatcagcgcgccgacgtgctcggacaggtcgtagttgatccaggccgggatgttggcggagaaggtgagcgtcttgcggtcggcgctcacgttgccggcggcggagatgccgatggcctcgatatcggtgtgtccggcggccacagcctcgcggtacacctcggcgatgtgctggttgatggcgtcggcatccatcggcgtggggacgcgccagcgctggatgatgctatcgttttcatcgcagacggcggcggcgatcttagttcctccgatatcaatggcgagcgtggtcatggcttactccttgaaggcttgtgtggcgtacgagacagcgaaaatagtaacgagttgccatgacctcccatagcgtatttttcatgatttgtcatatctcgcgcgcgttctgccaatgtgaccctgcacacgtttttcaccatttataagcactgttaacgctaacgttgtcattcaatagcaaacgttgtcattcagactatcggcgtgtcgagcagagccccaaggccagcacgaaaccttcggtatttccatgcgatacggcatcggcatcgactgaaacagcttccatgccagagtcgaatggccatcaaacgactaaacaccagacacacattttggcctataaccccatatttcgccctacaccacgaaatacggcaaaagaacaaaaaagctcctgacatttgtcaggagcttggtggcgaccccggccggacttgaaccggtgacctccgccgtgacagggcggcgctctaaccaactgagctacggggccatctgtacctcaatgaagcacaagaggatatactacagcatcactggaccgtggcgcgccgcccggcgcgtcgcgccacggcaatgtcaggcccatccattacccctccaagccatagcgacgcccgccattccagcccttccgataccatggtgggcggtggtttggcgtggattcgatcgttatgcggacagggcggcacaggcctgacgcggcgcaccgcgatccgtgattcggggggcgtgctccgcgctgcacacagcgtatccatcacaaactaaagactaaagaaacagcggaattccaacccctttttaaggagtaactgcacaacatggcagaattcgtatttcagatgatcaaggcccgcaagtcttacggcgaccgcgtgattctcgatgacgtgaccctgagcttcctgcccggcgcaaagatcggcgtcgtgggcccgaacggcatgggtaagtccaccctgctcaagatcatggccggcctggagaccgtgagcaacggcgaggccagcctgaccccgggcttcacggtcggcatcctgcagcaggagccgccgctggacgacaccaagaccgtgggcgagaacatcaagatggcgttcggcccgattgccgagaaggtcgcccgattcaatgaaatcggtgaggagatggccaatccggacgccgacttcgacgccctgatggaagagatgggcaagctgcagaccgagatcgacgccgccgacggctgggacctcgactcccagctcgagcaggcaatggacgccctgcagtgcccggacccggacaccccggtcaacgtgtgctccggtggcgagcgccgccgtgtggccctgtgcaagctgctgcttgaggccccggacctgctgctgctcgacgagcccaccaaccacctggacgccgagtccatcctgtggctggaacagttcctgcaccagtacaagggcgcagtcatcgccgtcacccacgatcgttacttcatggacaatgtggccgaatggatttgcgaggtcgaccgcggccacctgtacccgtacaagggcaactactccacctacttggagaccaaggccaagcgtctggagatccagggagccaaggacgccaagctcgccaagcgactgaagaacgagctcgactgggtgcgctcctcccccaaggcccgtcaggccaagaacaaggcccgtctggagcgttacgaccagatggagaacgaggcacgcaacaacaagaagctcgacttctccgagattcagattccggccggcccgcgcctgggttccaccgtgctggaagccaaccacatccacaaggccttcggcgagcgtgtgctcatcgacgacctgtccttcacgctgccgcgcaacggcatcgtcggcgtgatcggcccgaacggcgtgggtaagtccacgctgttcaagaccatcgtgggcctggagccgctgaccagcggcgagctgaagatcggcgacaccgtcaaaatcagctacgtggaccagaaccgtgagggcctggatccgaacaagaacctgtgggaagccgtgtccggcggcctcgacttcatcgaggtggccggtgtggaggtgccgacccgcgcctatgtggccagcttcggcttcaagggcgccgatcagcagaagctgaccggtgtgctgtccggtggtgagcgcaaccgtctgaacctggccctgaccctgaagcagggcggcaacctgctgctgctcgacgagcccaccaacgatctggacgtcgagaccttggaatccctcgaaaacgcgctgctcgaattccctggctgcgctgtggtgatttcccacgaccgttggttcctcgaccgtgtcgccacgcatatcctcgcgtgggaaggcgacgacgacaacccggccaagtggtactggttcgaaggcaacttccaggcctaccaggagaacaaggtggcccgactcggtgaggatgcggcccgcccgcaccgcctgcacaagaagcttgtgcgcggctgagatacgccggcattagtgccacaacgcgctttatacgtcgaaagccgtccctcaggggcggctttccccataattgccccatggctgcccgccccgcatcccataaaatcccacagtcgcctacggcaacacaccggcagcgcagcagcaacgtagcggcaatgcaccgcataacccaccgtttaccttccaaacagtctcgttacatttcgctcccggaactcttaacccccaccggatagactgccaaccataggttggaatacgataaccgaatattgaacacagcagaacaagaatcgaggaacgccatggctcaggcaaccaccgtaactccattggaccatctggtgaaggtgctgaagttgggcgagccttccgcttaccgcaatcacacatatatcaatggcgagagtatgtacttccccaccggccgcgtctacggtggccaggtcatcgcccagtcggtgatcgccgcgtccaaaacagtgggcccttcacgcctgccgcattcggtacatggctatttcattgccgccggcgatattcgtcaagacctgttgtttgacgtcgagaaccttcgcgacggccgctcgttctccgctcgtcgggtcaacgtcacccaagccgaggggtcgattctcacggccatcgcctctttccaggagaccggccaggagggtgtggaatttgccgatccgatgccggaaaacctgcccgatcccgaaacgttgacttccgccaaagaactcatgcagccgttcgccgagaagtcgccgttcgctaattactatgccgagaaatcgccgttcgatatccgccacgtgacgccgaccgtgatgctgcgcgcggacaaggattccgccgagcatgattccggcaagcagatggtgtggatgaaggccgatggccacgtcgatgtgccgcaggtcatgcatcgtgcgatgctggcgcttggctgcgatcaggtgatgatggagccggtgctgcgccgcgccggactgtcgatttccacaccgggcatttcctatgcatccatcgaccattcgatgtggtggtatcaggatatcgatatcaacgaatggcatttgtatgtgcaggatacgcctatcgccgcgcacgggcgcggactcggcattgccaaagtgtatgcgcagaatggcgacttggtggcggccatcgctcaggaagctatggttcgcgtgccgcaggaatagtcgcccctaccgcttgtaggcttgggctatgtcgctacggcgcttggcttccttgattttcgggttttcggggccttcgttcggcggtagctggcacaaccattcgccgataatgccgatgatcatgtcggcgatgcacaccacggccgcaattgcgcactcggtgacggcgtgtgcatagaaatccgcctcgatatggctcaagctcaccacaatctgaccgccataccagccggcgagcgttgcgcccgccaatcccagtgcctttgccagcaccagcgtatacaccgcgatagtgggattgatgaagctacgcggacgtttcttggggtcggtattcgcgtatttatgcacttgcagggccaagatcagcacaatgacgcccagtacggccagcaatccgggcacaatccaaggcgcaccaatcagcgacagtcccgagctttcgccgtaggaggccagaccaatacccgccaacaggcccaacacggcaccgatcacatactgccaccatggtgttcgccgtgttttcatgtccggcctccttatcgttgcgttgctgtttgctgtttgcgaacggccctcgcgctttggccgttcatcttgatttgttttttcgtcattgccgtgcctggctgctcgaggccagagactggtccgtcaccgtctggtttctagcctaccgttcgtaactggttccgccatcagctcaactgttcgacagtatccagttgtccgatagcaatccgacctgtccggcatccggtgccatggccaaaaggaaggccaccgggtcgccgcccagagaagcattcgggtccatatccagccaaggtgccaataccgacgcatggttacgggccgacggccaaggaatgctgcagttgggctcgtcggaagtcacgccttccatgtcaacaaggtcaaggtcgactgccaggtcatgaacgctttcgatgctgcccaatacggcaatcaggtcggcgggcggcaacttggtttcgatttggatgaccgcgctcatcgcgtccggactgtcgaaatggctgacatggtagagcggcgatatgccctgtacctgattgccaggaacactgtcgatggaaacgatggtttcgcggaacagccgttcggcatcctgcgaggtggaatccagcgaaataatcgccttgcgtgagacgggttccgactccgacgctgattcttgcttgactgcatgcccgccgagcatccagtcttcgctctcgagctgcacggcgttacggtccggcgcggcggccagcaaatcggctacaggcccctcatgggctccggcaagtttggcattcggattcagcgccacccagggagccagcacaaatgcgcgctgccaagcacgcggatggggcaatgccagatccggatccgcgctggtgatgccatcaaagtcgataatgtccaagtccaacggcctggaatcccaatgattctcacgaattcgcccatggttcgcttcgatgttctgcaacgcggcgagcaattcgtggctgcccattgtggtttcaagctccaccacggcgttcaggaaatccggcgtaccgtcagccatgccccacgcggccgtgcggtaaagcggcgaaataccggtcacctgtgtgccaagcagcgcgtcaatctcccgaacggcggctcgcaaggtggattccacctcgcccacattgccccccaaggccaccaccgcgttatggatggcatgcttttcagcagtgcgtccattatcggtggcacgcacgcgcgagatggagaccgatacatctgcaaaagccacgacgatgggcgcgtgaggcttgtgcacggtgacgtcgatggaggcgacggccggcgcatcggcaagaatcttatccgcgatacgttgggccagacgctcgatcaggtccacatgagggccttcgatgacagccacgatatccttggccacgcggccgtaatcgatggtgtcattgagatcgtcggattggccggcggcggccagatcaaggtgcagggtgacgtccacgacgaaggtttgtggccgttcgtgttcaaaggcgagcacaccgtgggtgccgttggcatgtacgccggtaagtgtgatggtgtccattggtaaggctttctgttcaaatgctccccctcagtcgccttcggcgccagcttccctcgcccgaggggagccaagacctagaagcaaccaaaaacagggagccaggggaatcatgcgtattcgcgccaggtgttgccggcgatgacggcggcgcggcttttggccacatcgtgtacgcgcacggcccatgcgccgtgctcggcggacagggcggacaaggctgcggtcacgtcatcgcgctgggccatggtcgggccatcagcaccggcagtacccgtcccggtaagcatcgccgaaatgaagcgcttgcgggactggccaatcagcaccggatatccagtggcgcggaaggtctcgagcccggtcagcagcggtaggttatgctcgatgccgggcttggagaagcccagaccaggatcgatgataatgcgctcaggctttacgccggcggccagcacgccgtcgacttggcgcatgagttcgtcgtgcacgtcggtcaatacgccatgctcgtatacggaggtgtcttgatcggggttcgcgcccttggagccggcgagccagccgcgccaatgctgcacgatgtacaggcagtcgtggtcggcgaccacatgcggcagctcggtgtccagcgtgccgccggaaacatcgttgatgatctgtgcgccctcgctcagcgcggcggcggccacggatgcgcgcgtggtgtcgatggacagtacggcaccggccggaatcaacgtcttgacggcaccggtgatacgggccagttcgtcggcctcggacacgcgcttggcaccggggcgcgtggattcggcgccgatgtcgatgatatccgcgccggcggccatcatgtcgcgcccgtgctgggccgccttggccgggtccagccacaggccgccgtccgaggacgagtcctcggtgatgttgagcacacccatcaccatggtgtgcgtggcgtcatgcaacgcctgcaaatcagtcataggtcatctccccttcgttgtttccccttcgctcccctcagtcacctacggcgacagctcccctcagagaggggagcctaggttgcgtcacttgtcaagaatcaagctcatggcttcggctcgggtggcggggttgcgtagcagaccgcgcaccgcagaggtcaccgtgcgggcggaagacttcttgatgccgcgcatcgacatgcacaggtgctcgcattcggtcaccacaatcacaccacgtgcgcccgcatactcgaccagcgcgtcggcgatctgctgggtcaaacgctcctgcacctgcggccggcgagcatacacctcaaccagtcgggcgagcttgctcagccccatcaccccatccttggcgggaatgtagcccacatgggccacgccatggaaaggcagcaggtgatgctcgcacaccgaatacagttcgatgtccttgaccagcaccagctcgtcggtatccacgtcgaagtgcttctccagcacatcggccggcgaggcctgcagaccggcgaacagctcgcggcacgcgcgggcgatacggtcaggcgtttccaccagtccctcgcgcccgggatcctcgccaatcgacttcaggaacagacgtacggcctcgcgcacgccttcctcgtcgtatgtgcgtttctcctgctggcaagactctatatattcgttcatctcatctctcccttgtcattgtccacaacgacgtcggcccggcctgcgtacgtgagaaaccacatgaacaggtcgggccgaatcgtcatcgtgtctactcttccggcttcatgccgaccgagcgcttgaggctttcggggatctccaccggcggcttgtccgagtcggggcggcggtcgttggacagccacaccggacgaaccggagccttcttgatcggcgcgaagatcgccgcaagttccttctcgttcagggtctccttgaccagcagctggcggaccagctcgtcaagaatctcgcggttgtcgttgatgatggtccatgcctcggtgtgcgcggtctccaccagcttcaacacttcgtcatcgattacttcagcagtacgatcggagtacttgcgcggctgcagaccatccatcacagtggtctgatcgtcgtcggaaccccacttgatggcgccgagcttatcggagaagccgtattcgatcaccatcgtacgggcgatgctcgtagccttctcgatatcgttcgaagcaccggtagtcgggtcgtggaagacgatttcctcggcggtgcggccacccatcgcgtaggccatctggtcgagcagctggttgcgcgactgcgagtagcggtcggaggtcggcatgacggcggtgtagccgagggcgcggcctcgcggcagaatcgtcaccttggtcaccggatcggtgttgttcaaggcggcggccaccagcgcatggccaccctcgtggtatgcggtgttgcgcagctcttccagagccatgcccttagacttgcgcttcgggccggcctgaacgcggtcgatggcctcgtcgatggcgcggttgtcgatcaactgggcaccggcacgggcgcacagcaacgtggcttcgttgagcacgttggccaaatcggcaccggtgaagcccggcgtgcgcacggcgaccatatgcaggtcgacgtccggtacgaacggcttgcccttggcgtgcaccctcagaattgcctcacggccttccagatcaggcgcggccacacctacctgacggtcgaatcgacccggacgcagcagagcggggtcaagcacgtcagggcggttggtggcggcgatgatgatgaggttggtgtcgttgtcgaaaccgtccatctcgacgagcagctggttcagcgtctgctcgcgctcgtcgtggccaccgcccataccggagccacgcttgcgacccacggcatcgatctcatcgatgaagatgatggcgggagcgttcttcttggcctcatcgaacaggtcacgcacacgggaggcaccgagaccgacgaacatctcgacgaagtcggagccggccatcgagtagaacggcacgccggcctcacctgcgatggctcgggccagcaacgtcttacccgtgccgggagggccgtacagcagcacgccgcgcgggatgcgcgcacccagcgccttgtacttggacggatccttgaggaagtccttgatttcctcgacttcggccacggcctcgtcttcaccggccacatcggcgaacttggtggtgggggtctggccctcgagcagcttgccgctgttcttcttgccgcccatgccgagcatgccgccggcaccgcccatgcggctcatcagccaccagaacaaggcaaggatgatgacgaacggcagaatcgaggtgatgaggtagctcatcacactggtctgctcgatattcgaggtccagcccttttcgagatcgccgttctccacggccttggccacctgtgcgccctgggcgaaggtgtagtagaactgcacgttcttgccgtagttggtcaccttgccggtgtcggcgttcttcttggtgtagtcattcttcagctcaaggcggacgacctgcttgttgtccgtgatctcggcgtatgtggccttgccctgattgatcagcgcgaaaccatctttagtatcgatggttttggtgccaccgccggcgaacatctggaacatcagcacaaccatgaccacgagcacggcaccccacagccagggggactgccatatcgggcggttctctttgttgcctttgccattgttcccgttattgccacggttgaacgggttggtgaacgggttgccgttgttacggttgttgttcgggttcgggttattgccgttacccggcccttgcgggaagctcatgcttgcactccttggtagacggacggcttgaggaccgcgatcgaatcgaggttgcggtagcgttcgtcaaagtcgaggccgaagccgacgacgaactcgtccggaatctcatagccggcgtacttcacgtcaacgtccacctctcggcgggaaggcttgctcagcaaagcgaagacttccacggaagcggcaccacgacgtttcagttctgcgaccagccacgcgagcgtgcgtcctgaatcaacaatatcctccacaatcaaaatgtgccgtccgcgaacatcggcggacaaatcctgcctgactgtgacctcaccgctcgacactgtgcccgagccatagctcgacaggctcatgaagtcgatctgtacaggaatgctcatggcctgggtgaacgcgaccagcgtattcacggcccctttcagcaccgcaacgagcagcggattcttatcgcggtaatcctcgctcgcgagagcagccatctcgtggatcttggcatcaatctgttctttgctgaccagctcgtggtcaatatcttcctcaacgtcagcgattcgcatgcgctccatcttggcacacgcgaatgacgtgtttcttgcgattggctgaataacctctgggaagtgagacgccgccttgtccatgccaatcgacgaccagccggtcgatggcggcaatctgggcagcactggcgttcacaccggcttggctcagcgcgtgagcgatgacccgcaaccgaatcgcctctggctcacgtgcaatacgtttgacgctgatcatcaggccgatgccatggctcgaatcgttggtatcgcctgccacacaggctcgtggcgcatcggtcgatacagctgccgacgatgccggccaatcaactgccgcaaccgcctcccccatcacctcgtcggatcgctgatccagatactccttatccattctggccaaccgtgcgctttcggcgaaatggcgggtgacattgaatccagcgaatcgttcgatggccggcagcaggtcgtgacgcacccgcgagcgcaacggatagtcgttcggcaactcgccgtctaccgcatcgccattggtggggtcatcccaatattccacacctaagtcttcacagatgccggtggtttcggctcgagtaagggtaagcagtggccgcgcaaaagtcgcgccactgcgtgtgaagacctgcggcatgccagccaacgcatccacgcctcgactgcgcagcaggccaatcaatacggtttccgcctgatcgtccatagtgtgggccaacagcacggcaatggcacccgattcatgcgccgcggcgcacagctcgtcataccgggcctgccgtgcggccgcttcgaggccctcgccgcgcgcctgtacggttgcgttgcgcacgatgaccgggcccagtcccaacgcgcggcaacgatccgcggcctcgctggcgacctgttcggagcctgcctgcaagccgtgatccacaatcacggcaccgcaacgcacgcccatggacgtgcatacgatatggctcaccgcagccagtgccatcgaatcgcgcccgcctgagcaggccacgagcacgagcggcgcatcggcggcaacggcatggtccccatgctgcgcgaattcgggagcctgcacatcgcatagttccacggcactcagcgttgcgcggaccgcgcctacggccttgcgcaatcgtgcggaatatgccatgtactcaccaccttttttctggttataggcactcgtgcgtttatggacgtttacggcctttgtagcccttgatggcccttgatgcctcttttacagccccgcgagcttggtgataaacgagtcgatggcgctacgcgcggcggcataatcctcaggattgttgaccaccacggcaaacgacaacgctcccccattggtgcgggacacattgccggccatcgacgtaaccgtgccgaggctgccggttttgacgcgcagcagaccagccacggcatcatccgtataccgatcctgcgccgtgcccaccaatcccgcgatggatagaccttccgcgccggccgcgccgctcttggtggtcagattacgttgttggacggccgccagcgtgcgtacggtgagccgggagccgggagacaggccggagcaatcggccatggtcagaccggatgtatcgagaccgagatcgttcagagtggatttgaccgcctccgtgccgccttcaggactgtttgtcgctgatttcgccaaggcggtgagtctaccgaactcctcggccagcgtattgtccgaatgccgcaacgtgtatgccatgatttcggacagtgttgccgaactcaccgaggccaaaggcgtttcgccggatggagcggtgtttgccgtcacgtctccggtaacggccacaccgttcgattggagcagttcggcgaatttcgtggccacgtcgctggcggtgtgctgggacagttccgggtatccggccgaatcatcagggtcggccggcgcaggcgtatcggcggtgtattggcggcctccatcaatcgccattgatgagaccggcgtgaagtagacggtgtagtcgcttaagactgcgccgccttccgacagacctgccggaatgcgtgagtcgccgaatagggtgtcgtcgtactcgagattgacggaagtgatgcctcgctgggcgagcgcggccacggtggccttggccaaggtgttcagaccggcacgtccgttggtatggttggcgtcagaatcgcctgcagacagcagcatgtcgccattgcctttgagggtcaacgtattggtgccgtcatcggattgggtgaggaacacttgggtatccaaggtggatgccatattcagggtggatgaggcggcgagcgcggtcagcgttttcagtgtggatgcaggctcgcgtggagtgttcgactcatgttcggcagcgacggtgccttgggcgtcttcaatgatcaccgacgtatcgtttcccacgccttgcgcggacagcaattcgttgaccagcgcagaagcggccgtggaatcaatggccttgttcgcgttcaaggtgccggcgacggtgccgcctgatttggcggtggctggatcggcaaaaacaggtgcggcgacgggcttcaacgtcaataatccgggggccacgtcggtgatgtcggcggcgcagtaccccgcgaacagggcgatggtggtcagtgcggaaatgatgacggtcagtgttcggcgatgcgatcgttgggtccgccgttgcgcttcacgccgctgacggcgtgataccgctgtagataccatcgtgctccttatgccaaggcgatcatttctgcaatgaggcgaacgagtcgagtgctgccacaatcgaaagcattcgcgcatccatcagcttaccgcccagccatgtcccgagtgccaggatgccgatgccgttggccagtgcgaccggaataatcgccagccatatgccgccttcggctcccgtcagcagcatgaccagcgccacgatgccggtgggcagcatcagcagcaggctgccaagcacgtagacgaacgggaagaagccttgggccatggcgcggccttgaggcgcggagaacggcttgtccattgaggcgaccgggtacatcagcacacaggacgtgacttcggccacgcccaggccgctcaaggcgacacccatgcccacggcgaggaagatcaggccggtggcgaggtcatcgggctgcgcccagcggccggtcagtgcgccgaccagcacgatgccggcgagatagagcagcaccatgtagacgaccatgatgccgacgtagacgcgcacgcggccgattctgtcggtccggccacgcacgccggcgatgacttccatggtgaagccgcggccgtcatatgcgagcccgttgctttccaccactgacatgaaccagccacaccagatcagcgactgccaaacgaccgcgctgatgccgtgcgcctggaaggcgaagatgatcaggaacaggaccggcatggcgaaggtcatggcttggcgggggtctcgtttgagataggtgatcaggcgtgcggacaccgcgccggatgccgaatcgggcatccatgcgaatgcgccgatgcctttggcggtctcggacggactgtttgcgccgatggtgagccgttcatgcctcagacaccaagtgcatacggcgaagcagacgatccatgtgacggcaaggatggcgatgcgggcgatcagcaccgcccaagctccggtaagcgcgtcgaacggcagttggaaggccgcaccgaacggcgtccatgcggcgatggcggtcgccgcgccccaggtctcggtgttgaggctgaaggctatgccggagttgaccagaatgttcggcaactggcagatgatgacgaaagtcagcacgatgaagatgtagaacgcgcctttgccgcgtttgctggtcaccagcgtggtggatagggcgatgaccagtttggagatgctcatcatggtgatgacggccagcactgcggcgaggagggaactgatgattacggctggtcccatatgccgataggccagtgtccagagcatcagtgaggccacgccagtaagggcggggatgccggacaggccggaaagcagcaagccgaattgcaggttgcggtcggcgatgccgtagagcgcgaatttgcgtgggttcatggtggagccttcgccaagcatcatgagctggatgaagccgatgaagatggtcatggtcgcgccgaccagcacgacgactatgttgacgatgcctccgggaccaaggatgttcagcggaaagccatccgcgttcacggtgaagggcggcagtatgccgatgaaccatgcgagcacgccggtgccgatgatggtgccggccgcgagtacagcggaaaagacataggcgacggtctgccacgccgattttcgcagggtggcgagcgtgagcgtccagcgcaggcggaccagggtgatggcggtcttgatcattggcgggcctcatcggtgggtgtggcgggcgtaggcagaatcggctgaatcggctgggccgaagttggtgcttgggcttgggcctgcccgccatcgagccacgcgagatgggcggcttcgtggcggccaccgactagttgcaggaagcggtcttcgagttcttcgccagcagcgacctcgtccaccgtgccggccgcgcataccagaccgttgttgattacggccacatgcgtacacatcttttcgaccaatgccatcacgtgtgaggagatgatcaccgtgccgccagtcttcgcgtattcgatgagaatgtctttgaggttggcgctggacaccgggtccacggattcaaacggctcatccaagaccagaatgcgcgggctgtgaatcatcgcggaggccaggcagatcttcttggtcatgccggccgagtaatcggtgaccatcgtgttggcggccccggccaagtcgaaagcattgagcaggtcctgggcgcgacgcgtggtctcctcgcggctcatgccgcgcagcatgccggagtagacgagcaattgcaaaccggtcagtcggtcgaagatctggtcgggctggggcatgacgccgatcatgcgcttggccgtgttcacgtcgctccacacgtcatggcccagaatcatggcggtgccggcgtccggcaccaatagaccggtcaccatattgagcgtggtggttttaccggcgccgttagggcccaccagtccgtagaacgagccgattggaatgtcaagcgcgagcccgttgacggcgatcttccggtcgaagtgcttgaacaggccgcgaatggacaccgccgcattcgggttcggcggccatgcttgcggctgtggctgttgcgactgcgcagacgcgggagcggcggctggcatcatcggcggctgaaatccgacattcctttgagtattgtctaagctcatgcatctactctagcccaccagtcaaccctcagcgcagcacccccggattactgttggattgccccgctgagcagctccggactagcggactcggtcagcccttatgcgcgatgggcttccactgggctttggcgaagatggcctggaaggaaatcggcacgtagctgagcatgtaaatcgggaagctgagcacataggcgagcagctccttgttcgtggcaccgatctggtcgtgctcgacaatgatggtcaatgcagccaatgccatcaggcccaacaccgatgtgatgatgccgctggaccaaccggccagcgattgcagctggctcgaccaactcacgaagccacacgcggcgaacagcaagcccatcaccgcgcgaatcacgcccaacacggtaaacggacacagcatcaaggtgaagtcgatgcaggagaaatcacgttcgcgaaccgcgcgtttcagcaatgccgagccataataacggaatacctgcaggaatcccttgctccaacgcaaacgctgacgccaactttgcgagaaggtaaccggctgctcgtcgtagaggatcgcagtaccgcaatagccgatgcggtcgccatgcagaatcgaatccatagtgaattcaagatcttcagtgagcaggtggaacttccatcccttgttccgcttcatcacctcgcgggagaacatgaatcccgtaccgcccacatggcaagaggaaccgagaatcatacgcgagttagacaggaatcgcgattcacggatgaaccacagcgcagaaccagaagacacccagttatccgccagattcaccgaattacggtagctggtcagaatcttgaatccggagcagaacgccttgttcatttcctcgaagtaatgcttgtccagcttgttatcggcatcgaacacgaagtaagcctcataatcatcggccacaccgatgtcgagcatatgccccaacagatacgtcagcgcatatcccttgccaaccagttcaagattgtggcgttccaccacatggcagcccaaagaccgcaccacgtcggcggtgttgtcggtgcagttgtcggccaccagccagatgtcgatgaggttggacgggtaggtctgatcgcgaatcgacccaataaggttgccgatcactttttcttcgttgcgcgcggagatcagcacggcataccggttggtcatcggggcgtcggggaagcgcacgggcttggcgaacagggacatcacgatgcacagtccctgatatatcatgccggcaccaccgacgattaccagaagaatatcgagtacggaaagcagggtcatcagcgccaccccgccctaggattgctggaggcagattgatcagactgcttggtttgcttgcgttgcttgggctgctcagactgctgcgtatccgcggcaccacgctgcggaatcgccacggtggcggaatcgtccaaatcggattctttcgtctcgtgtggcggaatcgcatagatctgttcctgcagcaaacgcagttcctcattcatcggcacacggctggtggaccccttggccgcacgcggcatgtgttcgccgatcggctgcagcacatgctcgccgaacgcttcggacgcctcgacgatcttggacttcttctccggagtcggatcgttcatcagtggtgagtcaatcagctcatagcgcttggtgtacgcacggaagatggcctgcagcgatgcggtgaccggcagcgccaggaacgcgccaaacgcgccgaacagcgagccgaacgccagcaccgcgaggaaggcgacggccgcgttgatatccatcgtgcgctgcgaaatcctcggcgagagaatcaggttctcgatctgctggtagacgatgatgaacaccagcaccgccacggcgtacgtccatccgcggttgccccaagcgaacagcaccggcagcgcgccgccgatataggtgccgaccgtggggatgaactgggacaccacgccgcagaacagggccaacggcagccagtagggcacatgcagaatctctaagaagatggcagtgcaggtggcgttgatcaacgccagaatcgaacgggagaacaggaaggacgaaatctggccttgggccacggtccacaccagcaggaatcggcgctgcgtgttgggggccagccactggcagaaggagcggcgcagtttggggccggcggcggagatgtaatacgcggtcatgaccacggtcatgaggttcagcaggaaggagaacaggccgcccaccgtactcatggcggtaccggcaaaatcggtgacccacgaggtctggatattgttgaagatttccatgccgagattgctgatttccggcatcttgaacgtggcatactggtccacgaactcacgaatctgctcatacatggccggcaaaccgcggaccatggcaatcatctgctgtacgaacatgttgccaaatagcgtgagcagcacacccacgaccacggccacgcccaccaagctgacggcagaagctacgccacgcttccagccatgagccaccagcgccaccaccagcggttcgacggccagcgccaggaacagcgagatgatgatgtcgagcaccagataggagatgtcgccccacgagcgccagcagaacatgaacacgatgacggcgagggccacatacagcagcgcgcggccgaaccattccggtggcctgcgggaatctcccttggcggggaacaaagtaccaaagtcgatacgattctcgtcgtccgggtctgccccggcctctgcggcaccggttctcgacgtgtcggtgctgtttacgtttcgcacgcgttcgctcatggctccccattgtagcgaggggtttgaagctcggatacgccggcggcgtacacccgcttttctattgttgatgttatgctcaacgtttcgatcatcatcccagcgtggaacgaagccgaacgcatccgcgactgcctgctgaacgccacccgtcagaccatcatgccgcatgaggtgctggtggtggacaaccgttctacggacaacacctgtgcggttgtcgaacagttcattgccgaacatcccgaggccccggtcaaactgttgcaccagaacgatgaacaggggctgattcccacccgcaactttggcctgaacgccgcgaccggcgatgtgctgggccgtttcgacgccgactgtatgatccggcctgactgggtggaggtggtctccggcatcttcaccgaagatccggccgcgatgggtgccactggtccggtgatgtattacgacatgccctcacgtcatttcgggttgaaaggcgacaattccttgcgcaagcgaatctaccgcgccgatggcggacagccgctgctgttcggctcgaatatggccttgcgcgcttcggcctggcatcagatcgcgaatgaggtctgccgggataaggccgatgtgatgcatgaggatatcgatatttccctgcatctgatgggcaaggatctgaaaaccgtgtactcgccgcgcatgatcgccgcgatgagtgcgcgacggatggatacgtcgttgagttcgttcctgagctacatgcgacgttttaagaatacgtttgatgcgcatccgcaacatacgcgcacgcataagccggaggtgttgttcaccgccatgtatccggcgatgcatatgttctacccggtgtggcagaaagtgctgaattccgcggatatcaatccggctgaagccgcgtggatcaacgagcagatggaactggcggaggcgcaaggcaagcagctgtacgacgagacccccaccgacgaagtctacgacgaaaagcacgaaaagtagctcgatatacgagccctctctgcttatgcaagctccctctgataagggggctgtcgaacgaagtgagactgaggaagagactgcgacgcagtcgctaaaacattgaatcggacgcaggccgatacctattattcagcggctacgccgcaacttctctccctcagtcagctacgctgacagctccctcatcagagggagctaatgtttactgtcatcgactgatcacatcagcgacttgtaaatcgcgaggatgtcctcttcggttgcctgacgcgggttgccgggggtgcacacgtcgtggaacgcgtcgtgagccaacggctcaaggtcggcctcggtggcgcccacttcggaaatcgtggtcgggttcttcagatccacggtcagcttgtggacggcctgcacggcctcttcgcgcaccttctccaggtcgccggtgtaggcgtcctcaacaccgaacgcatcggcgatgtcgcggtacttctcaccggtgaagtccttgttgtattccatgaccggggccagcagaataccgttggccacaccgtgggccacgcccagacggccgcccagcgggtgagccatgccgtgcaccagaccgaggcccacgttggagtaggccataccggtgatgtaggaggcgtaggccatctgctcgccggccggaatgtcgccgtcggcggacttggccaggttcttggcaatcatgcggatggtctgcatggacaggcagtcggacaggctccaggcacccggggtaatgtaaccctcgatggcgtgggtcagggcgtcaagtccggtggcgaccttcaggccgcgcggcatggagtcggtcagatccgggtccacgaaagcgacgatcgggatgtcgtgcgggtcgacggccacgaacttgcgcttgttggcggtatcggtgaccacgtagttgatggtcgtctccgaggcggtgcccgcggtggtcggcacgccgaagatcgggacggacgggttcttggtatccgcgacgccttccagagaaagcacgtcggcgaactccgggttggcggtgatgatgccgatgcccttgcaggtgtcttgcggggagccaccgcccaggccgatcaggaagtccgcaccggactcggcgaacttggcgacgccgtccttgatgcactcgaccggcgggttcggcttgacgttggagaacacctcgtacggcaggccggcctcatccagaaccttggtgaccttctcggcggtgccggtctccagcagcaccgggtcggtgacgataaatgccttggtgaagccgtgctgcttggcgacggccggaatctccttgatcgcgccacgaccgaagtatgcagtctgattgaaaatcatgcggtagaccataggggctctccttttgagctagtgtcttaactgatggcccactctgtctttgagtggtccaacggttccccagtctactccgcgcatgagcattcacctgaaaacacgctgaaagaacaacactgaaaataatggcaagaaatggcgtaattccgcacttgtcgaattattgtccattgaccaaaccagttccatcgcccgaaatctcaacgataaaaccagtttccggagtcatctgacgctctccgagaaactcgtctctcatccgcttacttcgcgcgtagcgcaatcaatatgcgagatgcctaattccattcgtgcttcatcagccgaacgcgaactggttcaccagatggtgtattcaacggtttcagtctcctgaagaggactaagatacctcgacagttggggtgatcatcataagagaatgaggtagataatggcaaatggcaaagctatgacggtcggcgagatggcgtccctgtttctcgaccccgccactcccgttcgtatcgacgctttcgacggctcgcatttcggcccggcagacgcggatttgaaggtcaaaatcgccacgccgaactgcatgtaccagctactcgcgcacccgaatgaaatcggcatcgtgcgctcatacattctgggcgatttcgacgtggacggcattgactacgccgacccgtatccggcgatgcgcaagctggtgtcgctgtccaaatacgttcgcccactcactcccacatcaattgcccgcgtatctgccggcatcctgagccatggtttcaagaagccgccggtgcccgccaccgagggcccgagcaagttcgcccgtatcaagcgtggcctgatgccgcacacagaaaaggccgattcggaaaccgtcagcttccactacgacatgtccaacgagttctacgccgacttcctcggcccctccatgacctacacttgcgcggtattcgacaacgaacacatgagccttgaagacgcacaggccaacaaactgcgcctgattctcgacaaactggacttgcagcccggccagcgcttactggacatcggctgcggctggggttcgatggtcatcaccgccgcccgtcgcggcatcaaggcgctcggcgtcaccctttccaaggaacaggccgcgtacgccaacgaatggatcgcccgtgaagggctgcaggatctggccgaagtgcgtgtgcaggactaccgcgaggtgcctgagcacgacttcgacggtatctgctcgatcggcatgatggagcacgtaggcgtcaagaactaccagagctacttcgaagagatgttccgccttctgaagccgatgggccgactgctgaaccaccagatcaccatcagccatgacaagcctcacggcaagcccggtaccgacgaattcctcgaccgttacatcttcccggacggtgatctcggcgcgcccggcttcatcgaatcgtgcatccatgacgccggcttcaacgtggtgcatcaggagaacctgcgccagcactatgcactcaccctgcatcactggaaccagaacctctccgagcattgggacgacgcggtcaagcaggtcggctttgaacgcgccaaggtatggggtatgtacatggccgcctgcgctctgaacttcgagctcgacggcatccagatccaccagttcttggccgtcaagccggatcgcgtgggccacccggacggcaagtggtatcccctgcgccaatggtggcaggcctgattcctttttgtgggacggcacgtcaaaaatcggcaaaatcacgtgccgtcccacacgattctctttgcgcgcgcatttcgcgggtgctttttctgcaatactgactctacgagcgccacagccccagacacggctggggcggacgatcgcaccgaccatgacacgcgcggataagacccacgtttctttatttacttaacctgatgttcgcattggtgctgttggcgtgcgtagttgcggcaaggaagacagttgttggcgaacgcgagcctttgcattgaccggccagcccgccattttggcctataacccccgccggagtaggtacgcgacggatatgcaaaagccccgcacaaggcggggcttcattatggtggctccgaacggcgtcgatccgttgacctagcgattttcagtcgctcgctctaccaactgagctacagagccatgaacagtcaaaaacccggataatccgggcttcataaccattccagcgaccccggccggacttgaaccggtgacctccgccgtgacagggcggcgctctaaccaactgagctacggggccattgttctcacttgcgtgaggcaacagatgtatatattactgaaattcgccagtcatgcaaacttcggcgtgttccgcataatttcaaggtttttgctatcaccagcacgcgaacacgtctgtcacaaacatccacaaaacgacgaagggcgcgaccggaaccccggccacgcccttatggacggaaacgcttcgcggcatccaccgcaaagtgaccgtcaatctcagtcagcctgcttccaggtgtcgacgtcgatgtggtgttcggggttggcctgccaggcatcccacgcggacttgacgatgtcttccacgtcgtacttggcatgccagcccatctcctcgttgatgcgcttcggggagccgatcaggtgcggcgggtcgccggcgcggcgggccatgacagcctcggtgaacggcagaccggtgaccttcttgacttcgtcgacgatctggcgcacggaggtgccttcgccggtgccgacgttgaaggcgtcgtacttgcgctcgtcacggtcgaggtacttgagggcggcgatgtgggcgtcggccaagtcggagacgtggatgtagtcgcgcacgcaggtgccgtccggagtcgggtagtcgtcgccgaagatggcgggagccttgccctgcttgaggcgattgaacagcatcgggatgaggttcaggatggccggatcctcaagctccaccggaccgcagccggccacgttgaagtagcgcagcgcgcagaagcggatgccgaacggctgctcgcaggcgcgtgccatccactcgccgaacagcttggtctggccgtaggggttgatcggcagcatcgggacgacgtcctcgggcaccacgtcgaccggcggcacaccgtaggtggcggcggaggaggagaagacgagcttcttggcgttcttggactgggtcatgccggtgagcacgttgagcatgccgttgatgttctgctggtagtaccacagcggcttctccacggattcgccgacctgcttgcgagcggcgaagtggatcacggagtcgacgccttcggcatcgaggatttcggccagacgctcgccggcgcccggggcggcgatatccatgccgtacaggcgggagccttcgatgcgagtgggcttgccgtagctcagatcgtcgacgacaacgaccttttcgccggcctgatggagtgcgtgaacgacatgcgcgccgatgtagccgcagccgccggtgacgagaactgtcatagttgacctttccttgtgcgggttgcaagtgtcggccgtggggagttcagcggctgttcacttttggtccgctttgttaccttttgaaacaatttgagtatatcacacgaacataatcgcacaaaacggtggtgtcgtccggcaatatctgcattcattaggtcgatttggcgttcattaggcaggtcggcccggagccggcccgcacggacaccgggtaaatggcttgatatggtggttggtatcgcacaccacctacctaatgaacgccaaatcgacctaatgaatgaacagcggtgcggcgcacaaggaaaatccgaggaatatatgaccgatcccgaatccacagcaatcgattccgtcgccgcgatgggcacagaccacaccgaggcaccggcgcaccccctgcacaaggtgctctccttcgtacgccgctccggacgtttggacgaccgcctgcagcgcgcatgggacaactatgccggcacatatctgttggatattgcggccggcaacctgctggacgtgcgcgaaggcgtcacgctcgaccgcgcgttcgtggagtccgcatggggcaacgataatccgctcattgtggaaatcggcaccgggcagggagaaaacgtggtggcagcagccgcagcccacccggagacgaacttccttgccctagaggtctatgaccccggcgtggcccacacgctgctgctcgccggcaagcagggtctgaccaacattcgcgtggcccaggtcaatgcgcccgagctgttcaaggtgaccgcggccggcaccgtggccgaggtatggaccttcttccccgacccttggcccaagaagaagcaccacaagcgccgcatcgtgcaggaggccatggccggcgacattcatcgcgcgctggtcacagacggcgtctggcgtatcgccaccgacatcgaggactatgccctgcacgtgcacgaggtgatggacggcctcgatggctggaagaacctgggcagcgtaaccgtcagcctgccgctggagcacgtgggcaagggcaatgccgacatggccgccgatatgccgcacgccgacttcaccgaatccgagcgattcgagggccgcgtgctcaccaacttcgagaagaagggcctggccgccggccgcgtgattcatgactttacctatcaggccgttaccttgaactaatcacgacacgccgaaatgccgtcgatttgcataaccgaacaacctcccgtaaagtaattcgagttgttcgcccccatcgtctaacggttaggacaccagactttcaatctgacaacgagagttcgactctctctgggggtacttcactaaaacccttgaaaacattggttttcgagggtttttctttttgtttttgatacaggtttgatacagtcgcccagacggacaactccattgagtccattcagaacacattcggaacaggcatagtggcgtaatcacgcttttagcgcattcaggacaccacccgtagagtcatcggaatccatcttccgggcatactcctccatatcgctgtcgtagaggtcggcgtaggtttccatcgtttgggagaacgtccggtgcccggccacgcgctggacgagttttgggcttacatgccggtgaatggccagactgaccgccgtatggcggaggtcatggagggtcatccagtcaggcaccccttccgtcattctcacggcggtcttgaaccatccggttcgcgagtcgggatgacgcatgtaatcatccggcgtcaacgcactgccgtcgttgacggcccctggccgttcgaacaccaacgcgtcacgatccttgccttccacacgctctctgagccgttcctgaagacggttaggagggaaagggaccgttctctcctcgtgattcttcagggcccccaccgacagtcttccaccggtccatacggcattctctcggacccggacacgatgattcgccaagtcaatgtcgccaaccctgagggcggtggcttcaccgatgcgaagtcctgtcagtcccatgaagagcacaagggttccatacctgtttttccttctgtcggcctcggcgctcagcgcttccagcttggacatctccagatacaccctccgcttttcggtatggggaatcggagccttgacccccttgcacggattcgagggaatccttcggtcatacaccgccgactcgcatatctgtcgcaagacccccaacgcatacccgacttgctttgcaccgaccgattcgctaatctcgctcacccactgctggacatcgctacggcgtatctcggatacacgagaccgctgccacttcggccttacccagtttgcccagaccccggcatccttgttgtagctcgacaccgccacaacccctttgcgccccagcagccaagcctcacccagctcccctatcgtcacgcgtccgctgtcgggatccctatagctgccgttattgagggaagcgcgtatctctatcaggaacgactccgcgtcgcgtttgagcctgaatccgcgcttgacgcgctggcgatgctgattgtcggtgtatttgaccatccatccgatgccaccggggaatttcttggcgttataggaatagacccccgtagtcacggcaatctcccgtcgccatcaacagcaggcgccgaacggcggcggaacagagcgtcctgggccgcatcgccggaatcgggaagcaccccttgacgagaagcgcaaagcccccatctccatacatcgagcgacgacaggaagcccgacagccccgtaatctcacatggcacatcttccgatgcggtctcgggcatcagcaacgacaacggagatacctcaagggccacggcaagtgcggtcagatcatccgccgtaacacggcgaagccctatctcgatgttacgcagctgcgtatgaacgatggggtggcctccgtccgacaatcttcgggaaagcgttcggtatgaaaggcccagcgccttcctgtatctggacacatttgcggcgacaatgcttcccgtggccccgttttccctctgcgtcatgacatccatcataagacaccgatatcgaatagtcggagtgtgaaccatgtgataattaacaacctaatgtaatgtatgtaatatagttacatatgttattaatttagttacttaaggaggataaatgacggcaggacagctaatcacccgttctgaagccgcgaaaatgatgggaaagacatcggggtatctggcgacgatggcctatcgcaagagagggccgcggttcatccgaatgtctcgcagatgcgtgatgtacgaccccaaggacatacaagaatggattgattcccataaggttgagaccgaggagtgatggtgccacggcaaaagaaaaccggtgccgttatagccgctgacaccggtaatgagatggcgaaggacaacgttgcgctcgacccaaacggaacgacctttggactggaaagccgatcagacgtacgcaccactatcctccgttatctaatgtacccctggctcgtggcgggaggcctcaacacgctgtccggcgcaggcggaagcaggaagacaatgctggcgctttacatcctggcccaagcaacgaaaggcctcttgcaggacgagaacggcaagccggttggaccaaagaaggtactgtacgttcatcagtatgaggacgttcccgaggcaatcatctatccaagattggatatgatggatgccgacccatcgagataccgcttgctgaccatgagacaaaggtccccgatagacggctctctcatccccgcatatccacctgtggaagacataaaggacgctcttaaaaatgtcgttttggactgggacccggatctcatcatcatcgacccgatagcccttctcatcgagggggacacgaattcaaggaaagatgtgcagccggcccttgtctactgcaacgcccttgcccaggcgcatcgcccgagaaccatactgggaatacaccactggaacaaagccgggacattctcaggaagccagaaattcgaggatacggcacgttcgttcatggacatagcggccgaccccacgagacccgagtcgtctatcgtcaccatcgagaaggcgaataacaatcgtaaaaggtcaatgagaatcatatccgctacacacccatacacggcagatgacggaggcgtgagaaacatccagattgtcgaaagaatcgaggacacggaactaaccgtcgacgcgattcgtcagatacggagcagcggagatgacgcggatgacgtcctagaccaggattcatggttgcgtgattatctgatgaaccagggccaggaaggagcgacaagaaagaagataatcgaagaaggggcaaaaaacggattctccgaatcacagctcaaacgcgccttaggacgaatagggggtgaatcgcaacgggtaaagagagcagcaggaggatgcgtgtgggttttacctcaagcctcccacatctcagaaagctgagaaagcacgaaccagttaagcaatgagagaagaacggctccatcgctcatagcgatcatttcaggccagcgacccgcggaccacacaaccttgagcctcatcatcgatggaccatcggccaccgggccaaacaccgagccggtggaccatcaaaggccagcgggccactcatgaggaccacggtccacttgggataaccgagtggaccggaccacctcggcaggcatgacccgccaaggaccacaaccccgtcacacctcccctatcggacatgcgcacaaccgaagtgcatgcatgtgaacccggcccggataggacctcattcatgcagcgtcacggccgaacgtcgaagatcgcgcaatctcataccacggaaaagacccgcgaccgggaacaaacggaaaaaggaaccgaacgccagaagcaaccttcccaaaaaccaccccaatccattccaccaaaaaagaacgaatcaccccctcaggataagaaaaagccatatcgagacaccatcagaaaacatcccagaaaaagagaaccctacccccagtaatttcgatatggacttcttgcacccaccgcctgacggcagccgcctttcggcggaatctcaacgtttttgatggtgtttgacgtttgaccgaccgatatcggccgttcgcattatcgatagggcgggaagacaggccgggctagggctccacgaacgatggaatcatggacgggaagcttcccgcatgccagagtgctgcgcggcggaggagcagaaaccgcggcggggaacgcactgacgatacacagggcgcgcagaaaccgacggtgccaacgaatgcgtgacgacaagccgacaatggcccatgatccttcgaatggagcgccgacctggaccacggggcatcagaagtcaaaggagcatcgacatggcccggcccgtggaccgcatttggaccgagagaccggggacgatacagcagggaccacggatggtggaccttcaaggaaagacgatttagcgccccgcttacattgattcgccgcacggaatgatatgacaagccactaaagactattatgtttcatggaacattatccgttgtcttatgaaacataatggaggccaccatgccgcgccaacgcattcaaagggaacgacagattctcgaaacactggacgcacacgacggtaaatgggtattcatcgtcgctgattcctactcggcgtcaaaggcctcatccattcgcagagccgcacgaaggcttaaggagaagggcatcatagacatcgagcacagggtgtctagacgtgagggcaaagcacccagacgcagacttgcggccaaacggcatcaggagccggtccttcctcatgatctcgacgtaatgcttccaccgaaggagaaaaagtccctgctcgctatacgctacactttcccttcaagccaggagtggagtaggcaccttgacggcattcgcgacagcatgcagaaggatatctgggagcagtgcgtggagatgggcggtgatatcgacaaaatcaagtattgcctatccctttcattccaagcggtcagagaccttaaatgaaagaggcaatccatccattatctggatactcccatgacagtgggtccttagcacatcaatgcatagggaaaaatccggaaaacccggagtagcgaatgccactgccgcgcgaaagccctacggcctgaaggcctccggtctgctttcgcttgcctcaaattcgactccagcttcgcaacgacaatgccgcgagacatttccttaaagacaattatgtactaattgttctatatattgctattacttgtcttctagatgttctaaatgcgttccaaatgacctgattgttcagaacacaaacagttaagccactcccctctttttgatacaattttgatacagacagacgtgattcaccatggtctacgtaatatacgtgatatgcaaaaacgttgattttccaaggtttttgcataatcatagaagaaccatcacgagttcgactctctctgggggtacttcactaaagacctcggtcatagcgaccgaggtcttttcgtattcgcgggaccaggtctgaaagcattcggcccgcttgatatgtgctcatggtttcatctcagcacgtgttcgcgcccgccacaaggactatcccaccatagacgatgtgacatcctccacactgtgacttcgcgcacagggtcccgacgccaccctcaccccgtttatcgacaccatgcgtgtataaccgcatatggcatcatcggcgaacatcggccggcagaccagttgtacaaggagaacatcatccacatggcagacaccgccaacaccaacaccaacgcctggctgccggcgctcaaagcggcgtttccgctgaccataccgatttgcctggggttcctgtttctcggcgcctcgtatggcattctcatgggcaccaaaggcttctccttcgtatggccgatgtgcatgagcgcgttcatcttcgccggttcaatggaattcgtcacggtgaatctgctgctctccgcgttcaacccgctcgccggctttctgctggccctgatggtcaacgcccgtcacctgttctacgggctatccatgctcggcaaattcaaagggctcggctggaagcgcccatacctgattttcggtatgtgcgacgagacttttgccatcaactccaccgcgaaaatccccgccggcatcgaccgtggctggttctacttctgggttacgctgtgcaatcagctgtattgggtgaccggcgccacactgggcgggctgatcggcgcgcatctgccgttcaataccgacggtcttgatttcgtactgaccgcgctgtttctggtgattttcctcgatcaatggctcgacggcaagcatcgcgagcgactgtccgccgtcatcggtgtgctgacatcactggcctgcctgctgatattcggggccaatgatttcatgattccctcgatgatcgccatgctgatactgttcgtcgcgttgcgcccgcatctggacgtgttgcggccagccgccgacgccccggaagccacggcagaccgttccatgagccacgcaacggaccagcagaaggaaggacagacgcgatgacgatgaccatctggcaaggcgtaatcactatcgtgacggtggtgctgggcacgatgtgcacccgttttctgccgtttctggtgtttcccgagtccaagcagccgccgcgcatcatcgagtatttcggccaggtcctgccctatgcgatgaccggtctactggtggtatacgcactgcgcaacaccccgattctgaccggttcacacggccttccggaactcatcgcctgcaccgtcatcgtgctgctgcacgtatggaaacgcaatatgctgctttcaatcgccggcggcacaattgtatacatgttgctggtgcaactggtgttctgaggcaccagactcgttagtctcgccctccgcttcgcggtgacggaggtagagacccgcagtcgtaagactgcgaaacacacagcatcggccacaggccgattcctacagctgcttcgccacccaatcgacgatgtacggggcgacttcctcaatctggtcgatggcgacctcgaactcgtgcttgccgccgtaccacgggtccaccagatcgatctgatcttcgcggccgggcttcggcttgggcagattcgggtcgaagctgcggtacatgtgcacttcggcgcgcttgccggccggcagcatgcgcagcagggcgcgcatgtgggaggcggtcatcggcaggaacaggtcggtacggtcgatttcctcacgcgagatgcggtgtgcgaagtggtcacgcggaatctcatcaccatagccacgttcgcgtagcacgcgcacggcacgcgggtcgatcgggtggctccactcctcgtcggacacaccgctggattccacgttcacctggtcgccaagaccgcgctcattaaagaagtgacgcagaatgatctcacccataggcgaacggcagatattgccggtgcagacggtcattacggtgtagggctgggtattgctcatagctttgaatcaatcctcaatcgggcttcaccgggccgcacacggcccgactgtattgttggggtcgaatgaatatgaatccggctcatgccgctataaagggcataagccggattcgcatgcttacttggttttggccaagatacggaaacgataggaatcgatgccggactcctccttggcgggcgtatgccactcgcccacttcggcttcccgccacatcccggcctcgaccagcgacgccatatcgggcgcgtagctgtcggcatccacggtggcggccagatcagtcacataggctttgtccgcgaacggcaaagccttggcgaacaactgggcgccgccgatgatccaaatctccgaacggtccagaccgtcgtccggaatcgcctcctgacgggccatatcgagcgcgtcgtcaagactggtgaccacagtggcccccggcgcacggtacatcggatcgtgggaaacgacgatgttgtcgcggttgggcagcggccggtacttgccccccagcgattcccaggtcttacgacccataatcaccggatgggagacggtcagctccttgaaatgcttcatatcctcggcacagtgccaaggcatgccaccattgaggccgatggcaccggcgcgaccttccttgtcacgggcttcggcccagataagattcaccgagaaggtcttgggataatcgtcaccccagtcttcttcagtggcagacagcccggcagatccgggctcgggttcgtgatagccgctacggctactgtcatgctccatttcgcttactcctcctggattgcggaactgggccttagtgtagtggacagcgaagactcgggggccgtcaccttcacagtattcgctgtccacgaaacggtaatcagcatcagaccgcaacaggtgccttaatagtggggtgatgctggtagccgacgaccttgaagtcctcatactggtagtcgaacagggaatcggccttacggatctcgatggtcgggtacgggtagggcttgcggcccagctgctcaaggaactggtcgacgtggttgtcgtaaacatggcagtcgccgccggtccagacgaattcgcccggcttgagcccggcctgctgcgccatcatcatggtgagcagcgagtaggaggcgatattgaacggcacgccgaggaacatgtcgcaggaacgctggtacagctggcagcttagcttgtcgtcggccacgtagaactggaagagcgcgtggcagggcggcaacgccatcttctccacctcggccggattccacgcggagacgatcatgcggcgcgaatccggatgatgcttgatgaggtcgagcacattggagatctggtcgatggtgcgattcgggtcctcgggggtcggcgcgggccaggaacgccactgcacgccatagaccgggcccagatcgccgttctcgtccgcccactcatcccaaatatgcacgttgtgctccagcagccagttgatgttggaggaacccttcaaaaaccacagcagctcataggccaggcctttgaagaacacggtcttggtggtcagcaacgggaagtacttcgacaggtcaaagcgcatctgctggccgaacagggaaatcgtgccggtgccggtgcgatcggacttcagcgtgccttcggtcaggatcttgcgcaccaggtcctcatagggcatcggaatgtccgtttcgggacgtgcggggatacgggagcgaatatctgcgagttgttcttcggtcaaagccatgtgcaccagtgtagcttaggggcataatagagaagtccactgatgcgggagagcggccaggtgccgcgctcccccgctggcatggcgatgggccagatcgccggcggctgaaaataaaggagcagctatgggtaagcgactgtgggttgagcgtaacaaggacggttcgtgggatgcgttcagcgacgatggcgcacacattaagttcggcaaggatcgtggccagttcacgccgggcgatctgatgaaggtcgcgctggccggttgcgccgcgctgtccagccagttcgccatcgaacatacgctgggtgagggcaagggtgccaagattgtggtggatggcacgtacgacccggaaaatgacgcctacaccggtttcgaggagcaggtggtgattgatgcttccgacgccggtctgtccgaggaggatgccgacaagctcaaggagcgcgtcacccgccatatcgacaagggttgcacggtcaagcacacctacgtgcaggagaccccggtgcgcatgaacgtcaccgtcaagcactgagacgggatataaattgaagaggctccctggcgggagcctctttccgtatattcggactttactggcgatcgggatcgatggtcttttcgatctgctgggcgacttcaggctcggctgcggacaccggaatctcctcgacgccggcaatctcctccagcgacttggtaggcacttcggcgggcgagctcggcacggtgtcgagacgcgattccgcggcctcaacgtacttgcgcggcaccacgtacaccgggccgaccgcatgctgcagcagtccctggctggtggagcccagcagcaagccagtgaagccaccgcgaccacgggatccgacaacaaccacatcgtgatcgtagctggccttggtcagggcgctcacggccgggccggaaacaatctgcttgttgatcttcagatcaggatgcgattcctgcaacggcttgatgcgcacctcaagatcgtccttgtaggactccatgatggcgtcctcgccatccacgcccttcaggttcggcacagcggaaatcacgtccagttccgcaccccagcacgtggcgaagtcggcggcaatgtccagcgccttcagaccccacttggattcgtcggagccgacggccaccttggtgatcgtgttgttcaggtgcatcaggttaccgtcatcatcggtgtacggcaccaccacaatcgggcagtaagcatatgccggcagcgatgaggacgtggtgcccagcaggcgctcggccagaccgcccttgccacggttgccgatgacgatcagattgtagttacgagacaattcgacgaacaccgatgccggatctccggtaacaatcagtgtggcggcttcgacgccctgctcgtctgcgatggccttggccttggacagaatctcctgagcatcggaatgcgcggcgttatcgtcccccatcgccgtgtaagtggcatcgaacgaaacggcggcatagctcggcagggaatatgcgcagacaatctgcagcgtcagccccgcgtgctttgcataattcgcggcccaccatgttgccttgtaactggcatgcgacccgtcaacgccgacgagaatagccttgtcgttaatcatgacgacctccttgaagttattgcggcacgaataccgcgtatctcaacaataccctgcgacactcggtttggccggtatcctccgctcaaaaagatattcgcatatacgaaaaaggcacatcccaaaggacgtgccttaatacgaattcgcttaccgcataattcttgtcacatcacgcggcgaatggaatatccagctccaccgaatacggaaacgtcgcttactgccgttccctgcaccgggttcatagcattcatcacctgtccgttaccgatgtaaatggccgcatgagtaccattcgcaagaatgtcacccggcttggcatccgccaagcttgcgaccggagtacccacagcggcttgagcaccagagcttcgcggcagggagatgccaaactgggagaagacgtactgcacaaaaccggagcaatcccatcctgccggagtgttgccgccggcaacatacggatagccttggaacttcagtgagaagctagcaagctcagcgccagccagtgccagtcattttacccaagtcaacctgtggaatcgacgcacgctgttcagagcggctggctgccgcagcagcagcggactgggctgccgcagcttcatcagcggctttctgagccgccgccgcagcagcagcttccttctcgccctgagactcggtctgtggcacatcaagagtctcgatgccaccccatttagagttctcatcaaccgaggtggaggtggattcggcgaacaaattcttcttcaccgaactcgccttcgggaaagaacgtgaggacaccacagcactcgtctgcgcggaatcggcagaggcaaacggggctacgcacgcaaacatggcacccgtggcgataatcgccactgatgaggaaataatagtcttaacgttcatcatcaacgccataccctagcacacatgggtcgatttcataacaggaatagcatttcgaagatgatgtcgcgggcgcatcactcggcaggagaacgcaacaggcctcggataccgattggcatccgaggcctgcaatatatcaatcaataagactgcatcacgggatacgcaccacaatggtgagcttttcggtcatggcactagcgagagccacgctgtagccattccatccaccatggaccgcctgaccgttgccgacatacaacgccacatgatcgtagtgtgcaccaccgttccatccaccggtgttggcataaatcagaatatcgcccggctgcagggatccgtctgtaactacgtggccaccgggaacattgacgtactcttcaggccaaccgtggaagttaataccacgggccgccaacgcttgactgaccaatgcggtgcagtccatgctctgtccgatcaaagaatacgcacggtcgatagaggcaccggcaccagcggaaaccgaaccactggcatcggaataagtaacagaagagcgagactcattacggctcgcggcgttggcctgctcctgggtcgcctgagcctcgacctccgcctgcttcttggcctcctcttcggcagccttcttggccgctgcggcatccttttccacctgagattccgtctgcggcacatcgaggttctcaatgccgccccaatcagcattgtcctcaacgctcgtggcagtggcttcagtcgtcagatctttgcgcacctgggtatacgaggggaaggacttggtggaagtcacagtaacgccctcagctgcagttgctgtaggaacaaacataaacaagcaagcacaggagacaatcgcggcaacaatggaagaagctacagttttggtcttcatagaaccatcaccctacacggtgcgcattaactcgtacaggatggaagaaataaaacaccccggagctattgggatatatcggcgtgtcggcacaggtcagttcggactaatacgcagccgcaacacttgaaatgccatctcgcgcgaacgattgccgatagggcgacgtcacatccgaacagtaatcaccgaatgtaagccaatgaaatgaatcagtagtgaacgtactggaacttaccggcttcggcggcgctgaacgtacgggtcgaaatcacacccaatcccttggcattggattcggagatctcaatggagccgtcggcattgatcttttccagaacggcaacatggccgtacgcgccatcggcatcggcctggccaggagcgaacaccacagcatcaccgacatggcgaggagtgttgtccacccaatagcccagagcggaagctgacgccgcccacgcgccaccattgccgaagttgccgctggaaggcaggcccagttcggcacgacgctggtacgcgtaccacgtgcactgaccccacggatagttgttggagttggtgccaacggcatggttcgggttgaagccagccggcacagcatcgccatcggcatccatgagagccgacaccacaggattgttcgcattattgcgattcatcagcttggcgtccaaggtgctgtctgaattgctcagcccccaaccgccttcattggtggactgtgcggtaacggaggatgaactcagatcagtacgtgcttcggaacgagaagccgcagtcacatcgctgatgcgcttaatctgcgtggtcgtcgtggccggatcagccacgaacgagttcgcggcgtcgtcattgttggaaaacgcgagagaacctgcggccgtgccgaccagagcggccagtgaggccgaggcaagaatatggctacggcgttcagcggcacgagcggcctcacgaatggaacgacgagtctggggagcgatttcgttgatcttctcggcaatggccggatcaagccccaaaacaacagcgtcgctaccagcggattgcaccgcgcgcacggcacgaacggaatgagaacccttgccggaggcaaacaatgccttcgctaagctgaacttctggcgcgagaccgtggtcgctttatgcgaagcatgcttcatactacgttaactccttggatgggttcggcggggtcatttcgacgacctcgtatgaccgtcacaattgagtactgtacaacgaacagaggtcaatcctcaatgtgatcccccaccatcagggtgtgtcaaacgatttacgtaaccgtgcggccgggtgaaaaactgccttgtttccgcccgttcacgaacctcactatccggttatcggaagaatcactaactcatgtcattccgacacaccgtagccatgatgtgctgcgtacattctgcactgcattccgcattgccaccactgccgcccggcaccccggaattccgcagtagccccgcagtaatcccgtacaccgagcattatccgcgatattccccaacactggtctacccttgaaaccatgactatcacactgagtattcccgagtcgctgaagcccgaagatggtcgcttcggctccggccccagcaaaatccgccccgaacagatcgccgcgctcgatgccggcgccaccaccctgcttggcacatcacatcgtcaggcaccagtcaagcaactggtcgcttcgattcgtgaaggtctgcgcgagttcttccacctgcctgaagggtatgaggtggcgcttggcaacggtggcgccagcgcgttctgggagattgcctgcgcttcgctgatcacccgtcgcgccgcattcggcacgtatggctcgttcagtgccaagttcgccgcgtccgccgcgaacgcacccttccttgaagacccgatactgttccccggcgagccgggcacttaccgtctgcctgagctcaccgagggcgtggacacatattgctgggctcacaacgagacctccactggtgtggccgccccgattcgccgcgtggccggaagtcgtgaagccggtgccttgaccgtcatcgacggcaccagcgcagccggcgctttgcctgtggacatcagccagaccgacgtctactacttctcaccgcagaaggccttcggtgccgatggcggtctgtgggtcgccatcctctcccccgaagctatcgatcgtgcggcaggcgtcgaatcaagcgctcatctggaaggcgcacatcgctgggtgccgccgttcctctcgctgaccacggcactgaacaactcccgcaaggatcagaccctgaatacgcccgccgtggccaccctgatcatgatggaaaaccagattcgctggctcaacaacaacggcggcctcgcctgggccaccacacgttgcgccaagtccgcatccaccctgtactcgtgggccgagcgctccgaatacgccgctccgttcgtcgtcgatgcggacgcacgctcgaacgccgtggtcaccattgatctggacgagcgagtccaggcctctcaggtactgtccatcctgcgcgagaacggcattgtggacgccgccggctaccgcaagctgggccgcaaccagctgcgcgttggcgtgttcccctcggtggaaccggctgatgtcatggccttcaccaagtgcgtcgactacgtggtcgagcacctgtgatggcacctatgccccgcattgccgaccatatatgccatgcacattgatcggtctcaactgatgccgattgaataaatcgtagggagggatgtttgacgcccctccctactcttactacagtgcatgagtatgaagttcgcgcctctcattgaccctgccgtccgcaaacccgcacccaagcccgtacgggtggatctgcgtaaggtgtttgccatcggtaccggtctatggattgtggcgttgattgtcgtgctgattctgctggccgtgggctacagcgtaatgccgttggtgattatgtgcgtggccggcgtcattattggcttgctactgctggtctgggaatacttcgaccgctgggactaccgccgcctcggacagtaacgcaacacaagctccctctgatgacgggagctgtcagcgtagctgattgagggagagaccgcggccgcaggtcgctcatcaaacagcattggtggcatgcaaggcatgccaccaattccttacctcactgcgccaacggcaacgtaaggctgaacgtactgccttgcccgggcgcgctccatacggtcacatcgccatgatgggtcagcgccacatgcttgacgatggccaagcctaggcccacgccatccgccgtgcgattgctctgttccacgccccggtagaaccgctcgaagatgcgcgcctggtccttcttagcgatgcccgtgccttggtcaatcacgcgaatcaccgcgcggtcgccatccttgtctttggatgcggacacgctgaccacgccattttccttggaatagccgatggcgttttcgatgagcttggtcacggcgctgtcgatctggtccgcctcaccattgatgactagatcatcgtcgcccttgatgttcagctgcacgccagcctcggctgcctgcggctccagtcgcgccgccgtggccctgagctgttccataacgttcagtcggttggcggaagacggcgtaatcggctcctgcgcgcgtatgagcagcagcaaatcagacaccatgtggttgagcttgctgcagctggaacgcacctggcgagcgtcggcagccacctgctgttcgtccagattgccggactccagcgaatcggcgagtttggccagagcctcagtgggggccaacaattgctcggacacattggtaataaacgagtcacgcacttgagcgaaacgaatcacatcactgacatcggtaatcaacacgatgacgaactgctcgttgatacgccctacagtcaccttcagccagttggggcggtggacggactgcgtggcgacgtgatcgcccttgttctggtctgcgacgtaccgctccggagtatcggtggtcaagtcgaactggcgcttgccaccggacttgcgcgcctcgtgaatggcatccagcacatactgctgggcaatggcgtcatctgacaccacacccaggcggtaggcggcgggattgcagcggaccacctcgtcgtgctcgtcgaccaccacggacgcacctggcagcatggacagcagcgtggcggtgtcgtcggacagatcgtcattgtcgtcatcatcggccagcggcgattccatggacactcgatgtgtcgcaaatcccacgatgagcgtgatgattcctaccacaaataaaacagccgtgacaataagagcaatcgcggcgacgagcggcatctgtgtcatgcccccattctttcacaccacacgccgggattgcggtttgccggcacgccggtaacatgaatttcaggtgaacagcccaatgaacagtagaacaacttgaggttgccattacctacgttgaagtggggaacaagtactggaataatacactggtacaggttgcaataagcaagcatgaaaggctagagaaatgcgcgttattttcaacgaggagctgaagcaggttgctgacgacctcgaccgtatggcgcagaacgtacgcaaggcgatcaaaggcgctggggaagccctgctgaatcaggacgttgaagccgcacagactgtgattgacggcgacatcgaaatcgatgccctggagtcctctgtgattgaccagtgcgtcaagttgctcgccaagcagaatccggtggccaccgatctgcgtgtggtcgtttccaccatgcgtctggcttccacgttcgagcgtatgggcgatcttgcccgccacgtggccgaggccgctcgccgcacctatccggccgccgcgattcctgaatccgctcaaccggtgttcgccgagatgatcgacttcctggacaacaccgctgaccagctggtggccatgctcttcgatcgcgatgccaagaccgccgaggccatcatcctggctgacgacaagctggacaatctgcaccaccagaccttcgatctagcgctgtccgatgacatcacccgtcagcagaccgtggatatcgtgctgctgggccgcttcctggagcgtctcggcgatcacgccgtgtccgccgcccgccgtgtggtgtacatcgtctccggcttcgaccccactaaggagccgacccgcgacgagggcaccgacatcgactgattgggacttgttctcacattgggcaaataactgaacacttgttctcctgtggtttgaggaggatgcccgaaagcggcgatccggctacggctggacgccgttttttgttgcttttgggcggtacaccggcgtatccatggggcggcaaaacacccatagggcggtaacttgcccatggggcggtttgaaggatatgtgaaaccgcggaattaagccattctggcataccgccccatgagggttttaccgccccatggggtaatcaccgccccatgggggatttggcaggcatagcaaaggggagccgcacgttatgtgcgactccccttacagcttgtaccgtgttagcggcttaggctcacttctggccctgagcggcgacagcggcggcaccggcagcagcagcctccgggtccaggtactcgccacgcggcttgatcggcttgaagttctcgtccagctcataaagcagcgggatggcggtcgggatgttgaccttggcgatctcttcctcagacaggttgtccagcatcttgacgatggcgcggagggagttgccgtgggcagcaatcagcacggtcttgccggccttgagctccggctcgatagcggactcgaagtacggcttcacacgctcaacaacgttggccaggcactcggcttccggaaccggatcgccggcgtagcgcgggtcgttgttctgggcgtactggtcgttcgggtcgatctcgggcggcggggtggcgtaagaacggcgccacagcatgaacttctcgtcgccgtactcttcgcggatctcggtcttgttcttgccctgcagagcgccgtagtgacgctcgttgagacgccagtcacgctgaaccggaatccacagacgatctgcggcatccagagcgatgttggcggtgttgatggcgcgacgcagcagggaggtgaacacgatgtccggaaggacgttcttctccttgagcagctcgccgccacgcttggcttcggcttcaccctgctcggtcagcggtacgtcgacccagccggtgaactggttagttttattccatgcgctctgtccatgacggagcagtactagtttataagtcatacggttcagtctacagccgcgtgcgcccaaacacgagtattcgtcttattatttcgctctcagagcgtcacggaaaccgccagcaccaccgcaaacagcaaggtctggaagctggcggcgggcagagccgggcggaattgacgtttattcacgctggagaccatgcgcacaggtattccgacgcccgagatcaacagcactgcgccccacggccaccatagggtcgcgcacatgagcagggctatggcccacgcggccacgcagcacacaatcagcagcgtacgcgcgccggattcacccagccgtacggccagcgtgcacttaccatgctcacgatcctcgtcgatgtcacggatattgttcaccatcatgatcaggcaggagaacaggccagccgccacagcacccaatagtccgccgacgtccaccgtgccgcacagcgcgtattcggtgcccaataccgcagccaagccgaagaacaggaacacgccgacttctcccagcccgacgtatccatacggatgcttgccaccggtgtagaaccagccggccagcaaggaggccacacccacggcaaacagccaccaagcttgggaaatcacgatagcggcaatgccgcatatgcaggcgatggcggcgcaaatcatcgccgcgaacagtacatgcttggccggtaccagtccggatgcggtcagtcgctggggtttgcctgatttcgattcgtccgtgtcacgcccggcgtcagtgccgcggatgccgtcggaatagtcgttcgcatagttgacggcgatttgcaggaacagcgcgactagcaggcacaggatggtcaccggccagaatcggtccatcagcagggtctgctgttcacgggccgtggcgcaggaggccggttctggatatattgcgatgcaggtgcccgaccgctcgatatgcacgtacgccatcaccgccccaaccatcaccgacgcgatggaagtgaccaaggtcttgggacgcgcgccccgaacccataagccgatagacataagcaatccctttcatatataactctggctcccctctctgaggggagccagagtatgcctaatcagccaacgagcggcttgaccagcgggaaggtgatggtctcgcgaatcgtggcaccggtcaaggcgataagcagtcgatcaatgcccatacccataccgccggccggaggcatgcccacgccgagagcctcgaggaagtcctcatcgatgtcgcaagcctcttcgtcgccggcgagcgcgtctttggcctgagccacgaaacgttcacgctgcacgatcgggtcgttgagctcggagtagccggtagccagctcgaagccgcgcacgtagagatcccacttctccaccacgccgggcttggtgcggtggcccttgaccagcggggaggtttcgaccgggaagtcacgcacgaaggtgggctcgtaaagcttgtcctcgtagaagtgctcccacaggtgttcgacgagcttgccgtggttctccacgtcgtcgcgctccacgccgagcttgtcggcgatggcgcccaggtgctcaacggaggtgccgggggcgtccgggccgccgttcggcacaatctcctcgcccaacgattcggacagggagtcgtacatgctgatggtcttccattcgccgccgaagtcgtattcggtgccgtcgagcagggtgaccttgtgcgagccgtagacgtccatggcggtcttctgcacgagctccttgaccagctggccgatggaatcataggtgccataggcctggtaggcctcgaccatggtgaattcgggggcgtgcgtggcgtcgacgccctcattgcggaagtcacggttgatttcgaacacgcgatcgatgccgccgaccaggcagcgcttgaggaacagttccggggcgatgcgaaggtacaggtcaaggtcgaaggcgttcatgtgcgtggtgaacgggcgggcggccgcgccaccgtgcagggtctgcagcatcggggtttcgacttcgaggaagtcgtggtcgtcaaaggtgcggcgcagggaggccacggccttggagcggttgcgcaccatgttgcggatgttctcgtccgcgatcatgccgatgtacggcttgcgggtgcgggtgtcttcgttcaggtccttgtgcagggccggcagcggctgcagggccttagaggcgatagcccactcagtggcgaatacggacagctcgccggtcttggaggcgatgacgcggcccttgaggtacaggtgatcgccaaggtcgacgagctgcttgaactgcttgagcgagtcggcgccaatctccttcttggagatcatgccctgaatcttggtgccgtcaccggcggacagctgcacgaagcacaggccgcccgcgttgcgcaggaacagcacgcggccagcaatgccgaccatgtcttcggtctcttcgccagcctcgagcttgccgtcatacttggcgcggaccgcctcgatggtgtcggtgacgtccaagtgcaccgggtagggggcaatgccggcctcaagcatcatcgcgcgcttggccacgcgcatctgcacctgctcggggtgagccagcgggccgaactccttgttggaggggtccacggcttcgtccagcgtggcaccggacttgatcttctcgcggatggtggcgtcctgctcgagcagcatttccgcacgttcgacggtgctcatctgcgggacggccggggtttcattctcagtgttttcggtattttcgacaacttcagccatgattcatcagtgtacgcaaggccggcgattatgagcccggcagaccgtacggccatctgaacacccgcccacatgacgcaaaaccggttctgcacaaggcttgagagacctgtacacacggcgaatccaccatcacgcaacactcgcgacatgccgatttgcattgtccaccaccacaatgtaatatctacgtctgttgccaaacgggctgtagcgcagcttggtagcgcgcttcgttcgggacgaagaggccgcgggttcaaatcccgccagcccgacaactggaccggattgttgagaaatcagcaatccggtttttcgtttcctaacccaacaatcagaccaagcgatcggacagcggtaaacaacccgccgcgcacagcgacaaaccgcgtcgcggcaagcgcccgtatttgttggcggaccaccgtaatatatcgctcgaatcaatcgattgccgcactgtttttgtaagtaatactgaagtaattagaggaaccatgaagaagagtctgcttgcactggcttcgggcgcgttcattctcggtgccgccgagttcgtgatgatgggtattctgccgcaggccgcggccgccaccggcgtgggcatccccaccgcaggccattacatttccgcgtatgcgatcggcgtgtgcttcggcacactgattctggtgttcggccgcaaggtgccgccgaagaacctcatcatattgtttatggcgattgccttggtaggcaatctggcctccgcgttctcggtcaatgccgccacgctgattgtcgcgcgcttcattgccggcctgccgcacggcgcatttttcggcaccgccacactcatcgccaaaaccttggccgacaagggcaaagaagcacaagccgtatcggtaatggtcaccggccaaaccgtagccaatatgctcggcgtaccggcgggcaccctgatggctgagttcctatcctggcgcctcgcattcggtattctggctgcatgggcggcaatgaccatcgtgctagttctggcatggatccccttcgttgcgccgattaaggacgccggcatcgccggtcagttcaaattccttactcgtcgtggaccgtgggtgattctggccgccgtattcaccggcaacgcaggcgtgttctgctggtggagctacgtctccccttggctgcagaagaccggtggctggtcgtctaacctggtaccgctattgatgatgcttgccggctttggtatggtcatcggcggtctgcttggaggtcgtctgaccgaccattggaggcatgccggcgcggccgcaataggtcagtccatctcctgcctcggcttgttgctggtgctgatcactccgggcaatcagccgatgaccgctgtactgacgttctggatcgccgtcggattgttctttacttccgctccacagcaattgctgatgaccgaagccggccaaggcggcggcgagctcatcgccggcgcagccgtgcaggtggccttcaacttcggcaatgccatcggctcgattgtcggcggtgcgatgctcaccaccttctcgatgaactatcgctataccggtctgggcggtatgccgctggccctgcttgccgtagggctgctggccttctactcgtggcgctgcgaaaccgataccgacgccattcaccgcatgcgcgaaatcaaggtggactgagaccaagctcacagcaaactccctgacgcgtttgttcacagtattaatagactgaaatcagacacgattcagggaggtctggcggtatggacgaggaagcactgctcaaacaattcgccgcacaattcgcgcatggtccagacgatgccgacgacaccgatgcggcggccgcagcgcaaggtgccgattctactgcgaaccaggccacggacgatgccgatcaatcgcccgcaacctttgatacccaacaattcctgaacggactggacgcgattttcgatcgccacgcggcagccaccgaagccggtccgtacttggaacaggcgatggtggacgcggaaaacgccggcgacgaggccggactgctcaccgtactcaacgaaacgatgggcttctatcgctcgcagggccggcacaaggagaatcagtggattgtgcagcgggcgctggaactggccgctcgtatgggcttgaccaccggcacatccgaggcgtgggccaccacgctaatcaattgcgctaccgcgatgcgcgcggcccaacaatacgatcaggccgaggatttgtatcatcaggcgcagagtgtctgccggcattcgctggcacccaccgaccgtaggctcgcagcactgcacaacaatctgtcgatgctctacagcgagacgaatcggcccgacaaggcggaactggagttgcgtgaagcgctgcgcattatcgaagcctcgagcgtgaacccggacgcggatatcgacgtgtccagctcgcacacgaatctggcgttgaccctgctgaccgaacacaagttggaggacgcgcattggcatgcagccaaggcgctggaaatctatcgcaccggccatctggaacattccgcgcattatgcctccgcactggcgggcttcgcgcaggtgtgctttgccgagagacggtatgcggatgcggttactggataccggcatgcgctggccgtgatcgaggaatgttacggcaaggacaccgattactggcgtatcaccgccgacaatctgcggcaggccgaggaagcggcggcgcaggccggggtgacggttgacaatgcaggtgttgccggcgatgcaggcgcgctgccccagtccggctcgcggctgccgaacagcccggcacagggcaagaccggtgcgaacgcggcatcttccccatccaccgtttcggtgtcgaccggttctgcgggcgcggccgaggccgtttccgcatgcccggtgtccggactgaagctggcccgcgcgttctggacgcagatgggcaagccgatgattgcggcgaagtatccgcagtataccgggcgtatcgccgccggtctggtgggccatggctcggaatgctacggattcgatgatgcgtattcgcaggaccacgatttcggcccgcgcttctgcctgtggcttacggatgaggattacgcggccatcggcgagcaacttgaggccgattacgaggcactgccgcgcaagttcagcgtggatgcgcaaggccacgtgacgttcgaggcgcatgccaggtccgatgcttccggagcattcccctccgcaggtgcaggctcccccgtcacgccgcgcgcacagggcgcgaatcgccgtgacggcgtgttccgcatcggtgacttctttgagtcgatcaccgggtatcgcactgcgccggcgcagaccgcgccgcatgagtggctgatgcttcaggaatcgaccttggccgccgccaccaatggcgaggtgttcgccgatcccaccggtctgttttccaagacgcgccaagggttcaagaacatgcccgacgatgtgcggctcgcgctgatctccaggcgactcggcatgatcgcccaggccggtcaatataatctgccgcgttcgttgaagcgcggcgacggcgcggccgcatggctgtccatccacgagttcgtgcaggccaccgcctcgttggtgttcctggttaacgtgccgatggtggtgggctatatgccgtattacaagtggcagttcgcagcattgcgcaagctgtctggctcgatgttcgcgctgttgccgaacgtgggcgaacagttggaaaccgtgatgcgattgagttcggcagcctgctatggcggggccggattcggcgaaggcggcaagggcgcggctccagcaatcaagaaaatcaacgatatcgtggagcagattgcggcggatatcgtcagggaactcaaacgcgaacacctgaccacgtccggcgagaccttcctcgaatggcagcgcccgtatgtcgaggaccacatcgcctccgatgatccggtgcttaaaagtttgtagattcaagctccctctgtcacggcttcgccgtgccatctccctcatcagagggaggattagtgaaaggaacgtcgatgaccaacgaactgactgatgatgaactgcgcgaggctattgtgcgccatgaatgggatcagttccagcgcaccaacaatgagggtggacgcgcggcatgccaaggcaactggccggtgttccaccagatgcggttggcccagttcctcacatgggaacggccattactcaccagctatgccgctgatcttgacgcggccgaccacgtgggccgcaacctcgtgaccgaaaaatacggccgcatgatggcctccaccgcgccggaagatttcacgaagaacatagagccgtatattccgcgtctctctgaagagcgcgtggcccgtcaggaacaggtcatcgcccagcaggtcgcctgggccaaggatttccgcgaacgctaccccaagctcggcgaggcgatgcgcgtactcaccaccaccgacgacacaccatctgccacctcattcgaaacctatctgcgcggcgagcttggtacgtattccgaccagaccttcgaacgttacgaagcaatgattggcgagcgggccgcagccagcctgcaacgcaatatcactgaggaaaccttgttgcacacggtccagctcggcggtttcgacaccttggaggaggccgaagcctcccaagcgtaatactcagccattcactgtgtaccggacaccccgactgatgtacgccggccggccacacccaggccaacgcaatctgccgatcgccccacacccagaccaccaacgcagcttgcccgccaagccccattgaccggcgcacatcggcagaattacagcgagaataggccccagaatgccagtgtcatcagtgtggtgagagtgccgagcgctaccatcacgcatatgacgcgccgtacaccgacgatatcggcgcggcaataccagacacgttccatttcccaagcaaacagcaccaccaacagcatggtcgctattcgcagcaccacccatccgacggcaaacagccgcggttgaggcataaccaatacagccgatacgcctacggcgctcatatagccatacaacagcacggtaatcaccattaccgctgtgccgataccggcagataagccggcaatgccgtgcaacgtacgctgttgggcggctcccagcccactcggcgtcgcatgcatggcccgcacagtcgccacactacgtcgcccggccagcaacgtctgtagccaagaaaacacagtcaagccaatacccaatatcgccgccatcacgatcagcacgggccctgccaccatcagaccggccagcacgccgagcgagccgacgataccggatctggtacgttgcggcgcggcgaagcgctggtgaggtgtcgcaccggcgacttggggcgttgcccatccatcggctttggttccggcagtcacaccgttcacccaattttccagcgcttgcgtatagccttcggccaatggcaggttcggggtgaataagccctcaccagcccgcatctgatggttgccggcgaaatagcgtacggtgacgttctcgttgccggacttgttggccgtggcgatgatccgctgcgccccctgttcgatgggcatggccgtatcgtaggtgccgtagttcaccagcaccggcatggtgagggatttcagataccggtcggcatcaaagtcggcataggccagatcgaatggcgcgtagtccagcgacatcaatttggccatgtctttgaccacgggcttgggcgcgccggcctcatgcgtataggcgctgacagccatggccatttgctcacgtccattgaacaccggtgcggatgtaagtatggcaaaggcaatgtcttgccgtttcgaggttagaatcgtggcgatccaggtgccttcggattcggcgtagatgccggttttggcggggtccacgccgcttatgccacgcagcacgtcgagcgaacgcccgtattcgcgagcaaaacgcgggtagtcgcgatgcagcacggtgtagttgtcgttgcgcttggccggcaccaaggtcacgatgccggcagaggccatggcgttggcgatatcgccgaaatcctcggcaccgctggtaccggacccgtgaatgaacagacaagccgggcgtggcccgggagcgtcgaccggttcacgtagtacggcgggtagcgtgacgccgtcgccggtcttgatggatagtcgggtttcacgcgtacgatatcgcccctcgtggggaatgttcgcatgggcaggggtgatggtggtgtcggcagaagcgatagcgatgtgcttggtgtagggccgtgtgttccattgcggcatcatcgcccagccaagtgtggcgaataccagcgtcatcgccatcgcggtggcgatgacgctcgctacccgccgcgccgaaatccgtttcatagttactatgcctcccccccatcagcatagaacggtcggctcttatcggtcggctcccgtcataatgtgcttctactgggaccgtaatgcaatggtttgtaacgctattttctcttcttgacggcaccgactatggcccatacaacggccactattaccagaataagtcccactacggcgcagataatagccgtcagcaattgcggattcggcgagaacagcgaaatcatccgatccggagatatgcacccgaaaaccagcgcgatcacgccgataatcacgcctaatagtccgaataccacagtaggcgcgctgatgctctgtttctggatgttcttggcactcttgacatccttagcattctggacgttcttggcgctccccccaggctggcatggtttgccggcggtctgagactgctcataggaaggttgcgctgaagatgctgcgtacatcggtacatcatcggcagatggaatcggcccgccatccccctccacggcatcggcaactgcttccagggcaatccgatctgtggatggttcgatgggcgatggagaggcagttgtcacctgcgtatccacatccgagaccgacgcatccgcatgatcgtcggggacgggtagcacagccgttttgtcatcatccgctgcggatggcagcaccgtggtatcggttcggtcatcgacggtcaccatggttgtggtctcggtggtctcgtcggtttcggaaggtatggccgtggtcggtgtcgcatcctcgatggaggcgaattccttggtttcatcagtcatgattccatctcctggttgtaacggcttgatcattccgattgcccggttgtgttcttgcttgtgctgttgccgtcgtatatatcggcaagcggctggaacgtggagcctccccaatcggaggcgtacaccacgttgacgtgtgcttccaccgcatagggaatattgatttttagttctgggccgttgtccggcatggcggattccttatccaaccattcgtaatcaggcccattcatgggattggtggcgctttcagcttcgaagaaaccaaagcttagacccatgtagttgttgtataccatctcgtatttgccgccgacgtcactcgaagtggagtagtaggagtcggcggtgccgaaggcgtaagtgcaggaatccggcagaacgatatgcacttgcgcctgtgttgcggctatggtgatggtaccgaccgggcaattactgatggaggttttgccatccagcatcttcaccgtgtgcggcccatgtgtcttgccccaatcggaccaatcaatgatcgcctggtcggtgttgtagttttcaccgctgaacgccacaccttgctgcaatgtttcgaacgtggcatcgctggcatcggcaacgaagatgccatccttttgtacatcgttcatgccgtcgctgtttctcgcactgacagattggctcagtgaaacaacagtattgatgccgctggcaccaagatcacggtagtgcacgccatacgtgcctgaaacgatggtcatgcagagcgcgcatccaccggcaaccagtccgagaggaatcagaccaccggtacgccgccctctgaatccgagaatgatgaccaccagccccatcactatgcatactgcggcaatccagatggtgctcagacgcataatgccgataatgcccatgtcgtttacccaaatcagtcccatcagaccggcaaaggagaggaaggtaaggcccagtatgctcaagaccacgattgggcccgccggcttgcggcgcttggactcggtgggggcatgagccgtcgcattcatacggtcgggggcaaacggcccgttgggtactgtgccgggcatcgcgctgggcactgtgcccggcatcacgctgggcatcgactgatagacaggctgtgaaacaggttgtgaaacactaggcgcggttcgtgaaacagattgtgaaacaggttgcggagctgaatacaaaggagatagagggaccggttgcgcggctggatatgaggcaggctgtggagctggatacgacacaggctgtgaaaccggtcgcggcgcagatgccccgaatccgtacccttcctgctggcgaatgccgcttttggccaacaaccatagcgctaaggcggcgagcgcaatacaaacccaccccgcacctggaatcacgattgccacggcgaggaacaggaagcatccaagacaattccagtcccattggccggcaatgaggtcctcggccaagatgtgcccatcgcgtacatccggcatcagaaaccagccgagtgcgtacagagctgcgccaaaaccgaagaacaatgtacatacaatcaccaacgcacgtactaatgtggggctccagccaagccgtaaagcgatgccgctgcatacgccgccgatccaccggtcgtcgccgcgaaccagtccactggatcgcacccaagtgaagaagcgtcgcgatgtcttgtttttttgcggaccaggctgcggctgtggctgatacggattcgcgtttggattgctcatgattccattacaccgcccgaccactgccacaacgctcggggaacaccctgattgttccctgaacaccgggtaaaaccccggccgcaacgccctgagcgcggcacaataggagtatgacgtcatctcccgaaccattgctgcctgcgcgcatgccgttgatgcgcccccggcagggccgttggctcaccggcgtgtgcaagggcatcgccctgcacttgggcatcggcgtggcatggattcggattgcgttcatcgcactgaccttcctctacggcgcaggcatcatcgcttatgtattcctgtgggtgttcatgcccgccggagacccggtgacggctgcagctcgcacagtgcccgttgatcaggcgccgcttgcgcgaggcaatcagccacttgccgctcatgacgacgaatcggcagccgcaccggaatcattgtccgaggccattcaacgtgctccgaaaccggccgtcgtggcattggccggtttcgcgttgatggccaccggactgctgctcaccagcaccggtgcggatgtccagattgtgcttccgctgctggtagggttgggcggcatcgcactggcatggatgaatcttagtccgcgaggcacgcagctgttgtctatgttgggcggcatcgcactgattttcatgggatgggcattgtatgtgcataatgtcagcattcccggatggggcagctctcctcgacgcattgttgccagcggattcgtgatgatcgtcggtatcgtggtggcggtgatgccgtgggcgaacgcgatgctgcaacgactcacccacgagcaggcattgaaggagcgcgaagaggagcgcgcggacatgaccgcccatctgcatgatggcgtgctgcaaacgttggcgctgattcagctgcactccgaggaaccgaccaccgtattcgccctggcacgtagccaagagcgcgagctgcgcgaatggctgtatcaggaacgttccacatcggatcgttcggtgggaaccggattgaagcagatcgccgccgaggtggaggacgagcacggcaagccgattgaagtggtcaccgtgggcgacgcacggccgagtgcccagaccgatgcgctgctggacgccacccgtcaggcgttggtcaatgcggtcacacatggcggcgagccggtgtctttgtattgcgaggccagcgacacgatggttgaagtgttcgtgcgcgaccatggcgaaggcttcgatatggacgccattccgcccgaccggctgggcatccgcgaatcgattatcggccgcatcaaacggcgcggcggtacagtggagatagtgtccagggccggctggggcaccgaggtcagaatgcatatgccgatcgcgctgaaagcggcgcagggagaacatcgatgagcgagaatgagacagccaagattcgtgtggccgtggtcgatgaccatgagatgttccgtgcgggcgtaatcgccacgttgcgtgattccttcgatatcgtcggccaagcggcggacgtgcccggttcggtggcgatgatcgcacagaccaagccgcaggtggcgttgctggatgtgcatgtgcccggcggtgaaggtggcggcggtgccgagatcctcgccaaatcgcggccctactcccccactaccgtgtttctggcattgtcggtttcggatgcgccgcaggatgtgggggcggtgattcgcgccggcgcccagggctatgtaaccaagacgattaccggcgctgatttgatttcatccatcaagcaggtgcatgagggctatgccgtgttctcgccaaaactggccggttttgtgctttcggccttccaaggtgtgccggcggcggggtctgatggcggcgctgatggtgcggcacgggctcatgatgaggagctggaccggctgtccgcccgcgagcaggaggtcatgcggctgatcgcgcgtggttacacgtataaagaggtggcggccgaactgttcatttcgatcaagacggtcgaaacgcacgtgagctcggtgttgcgaaagcttcagctttcgaatcgcaccgagctcacccgctgggccgccgataggcgcattgtgtgataaacgacagatgagctccctcatcagagggagctcatctgctcatatcactccgcgtcgcggaaaccgttggggttcttggtctgccagttgagggaggaggcggccatgtcgtcgatggtcagctcggccttccagccaagctccttctccgccttggaagcgtcggcgtagcaggcggcgatgtcaccggggcgacgcggcttgatcgcgtacggaatcggatgaccggcggccttctcgtaagccttgataacctcaagcacggagtagccgtggccagtacccaggttgtagacgaacacgccttccttgtcgatgtggtcaatgacggccacgtggcccttggccaggtcgaccacgtggatgtagtcacgcacaccagtgccgtcgggcgtgtcgtagtcgtcgccgtagacctggacttccttgagctcgccgaccgcgaccttggccacgtacggggtgaggttcgccggaatacccttcgggtcttcgcccagcaggccggactcgtgcgcgccgaccgggttgaagtagcgcagcagcacgatggtccaggacggatcggccacatgcacgtcgcgcagaatctgctcctggaacagcttggaggtgccgtacgggttggtggtgccgccggtcggcgtctcctcggtgatcggcagttccttcggcgtgccgtacacggtggcggaggatgagaagatgatcttcttgacgttgtgcttcttcatcaccttgagcagcacaagcgtggagtacaggttgttgtcgtagtattcgatcggcttggccacggactcgcccacggccttgagaccggcgaagtggatgacccagtcgatgttgttttcagcgaagacgcgttccatgagcgcctcatcgcgcacgtcgccgtcataacgcttgaccggcttgccggtgatttgctcgacgcgctcaagcgccacgggcgacgagttgccgtagttatctacggaaataacgtcgtagcccttgttgagcagttcgatgtcggtgtgggtggcgatgaatccagcaccgcccgtaaccagaacagtagtcatattccctcctttggaaggacttgccttcggtttttccttcagtattgagcttacttcacttgacctgtttcacctagcggcaaaaccaaggctttcgaggaatgtttgcgtggtggctttctgcttgaagacggccgtgttgccgaggatgcggtagcagacgctgccgagctcgtcatgtacggcttggcggatggcctcgcggtcgtggtttccggccaacgtttcagcgagttcgccccattcgagactgaattcgctgacttcatcgggcaaatcgcggccttcggcgagcgcctcttcgacaatgccgagctggtcgacgagccgtccgggcagaatgaacaagccttgggcctcgatcagtccgatcggctcctgcttgaccggccagtattcggggtgtgcatggaaaataccttccgggtactcgtcgctgatcgcattgttgcggaagatgagactcatctcatagccgcgttcggtgatgatcgcgctgggcgagagggcggattggcggttgccatccgcgtcatggctggcgatgccgttcgccgcgtcgtcataaccgacccatgcctcgcggatgatgtcggatacgtcgatgatgctctggcgactcttcgacaccacgcgcacggcggtgccgggccagtcaaggatttcaaccacggcgtccggatagtcggcaagtgtgaaggcggcccaagtggcggccttgtgcatcggcagcagttcgccgccgccctggtaatggtcatgggcgagcaccgagccgccgatgcgaggcagcgcggcgttgcatccgaggaagtatccggggaaacggtccacgaagtcgagcagatggccgaaggtgtcgcggtccacatgcatcggcgtgtggtcggtgttcacgcagatgccgtgctggtcgaagtagccgtagggcgagaactgccagaaccatgactcgccgccgagcgtgaccggcaaggtgcgcagcgtgcgcttgtcacgtccggcgaagccctcgttctcatggcagatcgtgcacttcgggtagccgccggccacggcgttgccggccgccgccttcttcatgttcttgaattcgggtttggcgaggttgatggtcaccgtcagcccgtgcgagtcgaagcgcgggttccggtcgagctgggcacgcttgacataattgttggccacacagtagtcgtagaaccattgcatggcggccatgccgccatcccggtgctcgacgagcaggaatcggtcgtcgagatcagcggggttggcggagaggatgcccatgatggtgtcggcgtaggccgggccttcctccggcttgaaaaggccggcggttgtggcggcggcgcggaaggcggcgagcagggggtcgggggtcttttcgccatagggggcctggcttcggctgccaacaatgtcttggactacgtctgacactgacgccgccgacgttgtggttttgggtccggggtaggaatctaggcggaagagggcgaagatttggttgcgggtccagtctgcgttgcgtgggtcaaggtcaagatgggccaaggcataatcgatcagggcgtcgatgctggcgtatacctcggtcagctgatcgttcattgcgctgcctccatcatgctggttcgggtatggttcggctgacggctcacctggcagcctccatgatgtcggctacgatggcgcgggtttcgctggccttctgctccatctcctgcacgagtttgatctgggtgcgggtgcgcaccagattatgctcggggtacttggtggcaaagtagatatcgccttccaagtagtcggcgagaaagcgcatgccgcactccatggtgagcaggttgccgctgaacggcagcagttcggcctcgcgcgcggtgatgctgccgcgtagttcgcccacgaagccttccgtgtaggcgcggaacagctcggtgctgaaatgcaccttgctgaggtccttttcgtcttccagagcagtggacgcaccaaagcgtatggaatcgccgaagtcgaacagcatggagccgggcatgatggtgtcgagatcgatgatcgcacgcgccttgccggtggtggcgtccatgaggatgttgttgagcttggtgtcattgtgggtcacgcgcagcggaatcgaaccgtccctgagcccatccatcacgacggcatactggtcggcgtgactcagatagaagtcgatttccggctggcatgcggcggcgcggccgagcttgtccgcggcgagggcggccttgaagtcctcgaaacgatgcggggtgtcgtggaagtgggcgatggtttcggtcagctggctggcgtcgaattcggacaggaagttctggaagtcgccgaatgcgctgccggcttcgcggaacacgtccgggttcggcacgaggttgtaggacacggtgtgttcgatgaacttgtagacgcgccatgcgccaccatcgatctcggcccaggtggcgcctgaggtggtgggcacaatgtccagcgtctctttgccctgagccttgagagtggaggtgaccagttcgacattgcgcatcagattcaccgtatcggggaagatgctggtgttcatctgctggaggatgtagcgggggccgtccgtggtcaccagataggtggtgttgatgtggccgtctccgtaaggttcgataccggtcacggcaccttccagcgcaaaatgcgaggcgatgccgaataaaacttcattgctttcagtcatgatgggtccgttctccaaaacgcgggatcaggcttcacgccaggcgataccgctgtcaggcaggtcgaagtcctcggtggtaccgtcggccaaagtcaccgtggtcttctgcggctgatcggtgttgttgattacgcaatacagcccttgctcggggaagtgcgccacttcgcattccggattggacgagctccaggccgcatacttgtcttcgttgtgggaagcgtagaacagcacgcgttccagcagtcgggcgttggccgccgaatagggcaggccggagatgtacacgccgcggcccttgccataatcgttggtcgcgagctgtacctggccgccgtccgcgcgcagcagggtcacgttttcattgaccggatacgtgttgagcacgggttcgccgaaatcgatgccgcccaacggcttgatggactggccgccgccgcagccgctcagcgggatgcggtagccggcctgctcccaagcctcgcgggccgccgggtcgaccggcacatcggcggtgatgaagtggtccggcaccaccggcgggaaatacttgtccaccgaaagggtctgatagcgctcctcgtccacgccaatcacgtcggccagctggaagaaccggcccgtttggaagcgcggtgccgagctcggctcgcccacgcccacgaacgcgccgccgccacgcacccaggcgcgcacggtttccacgagcttcgggttggtccacacgtcgccgccggtgaatgcggtgtcgaccgggccgccgttgatgattacgtcgatatcgctatcgatgccatgcgcgagtacgtcgtcgaagctgatgaaccgcacgttcacgcgcatgccggacagggattccagaatgccgtagtaggagtaggtctgcttgttgggcagggcgtgtgccacggtgaacgccatccaggagcgcatcttgccccaggaattcagaatcgccacgttgagctcaccttcggcggccaccccaccggtgcggtcgtggatgtcgcggaattcgttggcgatatgggtcaccgtgtccacgaacttcgggaacttggcggccagggagaggtagccgccgtagcccatgcggctgatcggcgagcgcaggatcgcgcggcgggccttgcgccagttgtcgaggccttcgaggctcggatcgttgccctcgtagaacgtgtcggggaagaagtacggcaggaagcgtccttccgtgtatttgacgcccggaatgtccgcgatcatgcgggtggtggtgccgtctccgatggagccgacgaccgcatccaaacccagcttttcgaacccgtccttatacggttcggtaccgatccactggtcgccaaggaacatcatggcttccttgcctgccgcgtgcgacatgtcggcaagccgcttgacgttctcgcgcacgaatccggagaggaagtcaatccagtcgcgttgcgccttgcggggcacgcgccacgcggagttgtaggcaccgccatccacgaaatcctccggacgcagacggtaaccgtactccttctcgaaatcgtccaatgcgcgcgggctcacggtgcaggcgcaaccgaaccagtcgaccaccttttcgcgacgcttggcatcgaacaggagcgtgaactggtagaagaacgtggtgaaacgcaccacatccacctgcgggctgtccttcagccactgctcgaacgtatcgaacacgaacttgcgggtggccggatggtagatgtcgaacggaatctcgtgttccttgtctccccaatcattggtcaggtggttgtacatctcgaccgggtcccagatgatgtaggccaggaaactcaccgtgtactcatgccatgcggcaacgccgctcacatgcacggtgtcctcgtccgcgtcaagcgtccagttcgccgaatcgacgacctcgccggtggtgcggtctacaacctcccaatacttgtgagggtcggcatcacgattcggcttcagctgctcagcgaagaagctttccatcagcggaatatcaaccgtatccgattcggcgagaatgcgatcggtcagcagatacacctgtggcgtctcatccatatgcagcgtaatccactcgttatgcgcgcgagtcgggaaatacgcactgtaaatcttcttgcccaaggcaagcacagcctcatccagatgcgtgccatcggagttacgaatggcgtccgctccccacagttcggcaagctccttggtcttctccgcaaaattctcctcgctaggcaaggtgaagcggccggtgctagtcatagtctctcctttgaggacattgattatttttttggataattaaattgtaaacaatatatgcatataaaacaagaatccgacacaaccgtcgggcgtccaggatcctgactgtataaatccttgagagtagccccacggcaacgccggaagagcgaattgaacatcaccggagcttcccggtcagtttcaccgacaatctcatgacaagaatcaggaaggctctggatcggtatggttgcgtgctacttattgttgagaagccgtccggcgccggaaggagtagcacgaggcaccggacggcgggaattattggtcttaggctgtccgcttaacgcgtcgccttcggcccctgcaattaaggactcgcctacggcgagactcaatgctgccttcgctcggctaccgcctcgctcgggccgacgctacagacagcccaccgggctgtccgcttaacgcgtcagcccttgaccgcaccagcggcgaggccggcctgccagtagcgctggagaccgaggaagagcacgatcacaggcagcacaccgagcagagcacccatcatcagagcgccacgatcagtgaaggtagccagagagaccatgccgtacagacccaaggtcaccggcttcaaggtgtcggaagagaccatcatcaacggcagcaggaagttgttccaagtggccacgaacaggaacaggaagatcgtgaccattgccggagccagaatcctcaacacaatggtgaagaagatgcgagcttcgcttgcaccatcgatacgcgccgcctcaagcagctcgttcggcactgaggtctgcgcgtatacgcggcccaggaagaagccgaacggagagacgcagcacgggatgatgatggagagcatcgtgttggtcaggtgcatggcatggaagatggagtactgcggaatggtcagcagagcggccggcatcagcatgcagcccataatcacgccaatggcaaggttcttacccttgaagttgaactttgcggtagcgtatcccgccatcacagccacgagcgtacccaccagagcggaaacacccgagtagatcagggagttcagcacccagcgccagaactggccacgggtccaaccaatcagcgtgccatagttcttggcgatggcggcaggcaaatcgctcagacccacggcgaaccacagaccgttgctgccggtcatctggctcggcgtcttggtcgaggcgatgatggcccagtaaatcgggaacagaaagtagatcagcgcgaagaccagaacaacgatggtgatggtcttgaccagcgcggaaggctgcatggaacgaggcaggtcgttggcatgcttgtcgcgaatcctgtcagccttcttacgagcgcgtgcgaccgcgcgggattccttatcagtagcttctacggtgctcattctgcgttcaccttcctttcaacgagcgtgtagaccacggcgagtacgccagcgatcagtgccataacgatggccacagcggatgcaggtccgtcaccacccggggtcagcgtgccctgcgaggtattgagggccatcatcattggcgtgtacgacttggaaatgctcggatcggaaatcgacatcacctgcggctcgttgaacagctggatggtgccgacgatggagagcagcatggcaagcagggcggctgcacgcacgttcggcagcttgatcttcatggcgatctggaagccactggcgccatcgatgcgtgcggcctcgtacagatcgtgcggaatggcctgcagtgcggcgaggaagatcagcatgttgtagccggtgaaggtccaggtcgtgatgttggccatagagccgaggaccacattgtcgccgaagaagttcaccttgatgccgatggcggcaagtcccttaacgataggggaaatctggccgttgtagaggtacacccagatgatggatgcgaccacgcccggaatggcgtacggcaggaagtagctcagacggaatgcggtgatgtgcttgacgatataggaatcgatgagcattgccagagcaagtgccgcgatgatcatgaccggcacctgaatcacggtgtagagcactaccctgcccacgccagcccagaagttgccggaagtaataacgtattggaagttctgaagtccgacgaacttatcgaccagttccccgccgccgtatgcgccaccgcccgtggtgacctggcggaagaagctggaataaatagcccaaatgatgggaagaataaataccagagcgaacaggatgccaaacggtgccatgaaggcccagccggtacgattctcacgcttcacagcatcagaagcctttggcttatcggcacgcctggcgacccccgtcttcgccgtttttgttgttgcagtcatagggaaacctgtctttcaaaagaacagtgagaaatagaaagtacgtaatgcagttcgaatcgatgcagtcagatcaaacacaattaatgacgaaccgaactcgagtaaaaggaaaggccggagtgttgagctccggcctttcgatgtgtggttgaggatatcagcggctggaaggaaccctaaccgttaatgtcactcggaaacagacaggccgaagttcttcagcgtatccacagaggtggtctgtgcgtcggagaagatgtctgcaaccttgccggagccatcggtggccttggcggcggtttcgttcatcttggcggcgactgcggagaagccaggcatgtaggtgaagtcacccatgttgttgttagcggtcttgaattccttcatgatatcctgaccaccgaagaaggtggaccactcggaaggagtctcagcgtcttcagtagtagcagccggcacgaggccctgggaaaccagatcaggaacctgggtgttgaaccaatccaggaactccattgcttccttcgggtgcttggagttcttcagcacggccacggcggaaccaccgtcagggccggtcttgccagcgttgccgaaccagtcaccgagctgagcgacctgccattcgccggagccggtgccaccggaggaggtcatgaacagcggggcttcccaagcggcggccacagtaccgatcaacgagccatccttgatggatgcatcgaaggacggatcccaacgcgggttggtggtggctgccttggcgtcgagcagctgctggtagaagtcagcggttgccttggagccatcggtctcggtgttgacgacccaggagtcgcccttcaccttgtaccaaccaccggaggcgccagccagaccggagatcatgttgccggcctcatcaggctggtaggacatgatgtacttgccagcggcggcagcggtcttggcagcggcgataaactcatcggcggtctgcggaatctcggtgatgccgagcttctcgaactcagccttgttgtagaagtaaaccagcgggccggtgtcctgcggcaggccgtaagccttgccgccaacctgaaccaggctgtacgggccggatgcgaagtcgttcttgtactgctcggcatactgggtcacatcctgcagcagacccttggtgaagacctcaggcagctcggcgtaaccgacctgagccagatccggagcctcgccggacttgacgtcggtctcaagcttcttgatcatgtcagaggccttaccatcgaacttggtggccttgacctgaatatccggatgctgcttattccacttggcaacgatgtcgttgaccagagtcatgccctcggaatccggcagacggtgcatgtaggtgatgttgaccacgccaccatcatcggtggtcttcgtgtcgccggcagtgtcgctgccgcaaccggccaagcccattcccattgctgctaccgcggcaaaagcagccacgatgcgcttattgcgagataccatatctctactccttcgtagtgaaatcatcatctcagtgtgatgactgattactaatgtatgccctcattcttttattgtcaacttagctaacaattaccgcgcgtcccgttgaggcgagtagcattaaaccggttcgatgctcgattgtgcgagtttgttcatttcattaactccccttacaaagcaacgtacttttggtccaccggtaggcctaatgagatattggatagcggcaacaatccaagacgttagcttgcaatcgtccaccgcaaattgcaagcacttgccaacattatcggttttcaggtcgccggcgcgatacccgaccagggggcaccgcaccttaatgagacgctacacgagcagtctcagcaactggtagagctgccacaggctacgcacgttgaagtgcgtgccgtcaaccgtggcgttcgcctcgccatcgcccatatggacgatcacggtgcgcccgttcacggtcagactaccgtgcatcgtgatatgattcatcttgcaaccttgttgattaaaggcgcaagccggtaatcaacgcaaaggcccgatgctgcaaacgtcgggccttttcttatcggctcacgccgatcggcccgtcatatcaacggggacaccgcatgttacggcatcacaaaccaatatatcagcaccccggcggcaatcaagaagacaggttccagaaaaagaaaaaaagggcctgggcatgttgcccaggcctcggttcgcggacagggcgagattcgaactcgcggagggttgcccctcaacggttttcaagaccgtctctttaggccgctcagacacctgtcctgatgcgcgttcacacgcgcaagtattcattatacagaagggagggatgttgatattcggcagtgcggtcggtcttggattcgcctgctggctatcagcgatctctccctcagtaatctctccctcagtcagctacgctgacagctccctcatcagagggagctaaagcacgatgagactcaggcctcccacttcgtgggctcgataacttccttgccgcccatgtaggcgcgcatggccttcgggatctcgatggagccgtccttctgctggtggttctccatgatggcgaccagccaacgggtggtggccaacgtgccgttcagggtggagaccgggcgggtgccgccgtcttccatacgctcgcggatgttcaggcggcgagcctggtactcggtgcagttcgaggtggaggtgagctcgcggtaacggccctgggtcggcacccaagcctcgcagtcgaacttacgggcggcggaggaaccgaggtcgccggcggcggtatcgatgatgcggtagggcacctcgaccttggcgagcatctcctgttccatggccagcaggtgctcgtgctccttgtaggagtcctcctgcttggcgtaaacgaacatctccaccttgtcgaactggtggacgcggatgatgccggaagtatccttgcctgcggcaccggcctcgcggcggtagcaggaggaccaaccgcagtagcgcagcgggccgttgccgaggtcgaggatctcgttctcgtgcatgccggcgagcgccacttcggaagtgccgaccaggtactggtcatcgggctcgcgcagacggtagatctcgtcggcgtgggagttcaggaagccggtgccgcgcatgacctcggggcgcacgagcgtcggggtgatggccagcgtgaagccgtgctcttcggcctggtccacggccatggtgagcatggcaatctgcatgcgggccacctggccacgcaggaaatagaagcgggagccgccgaccttgacgccgcggcgcatatcgatgccggccacgccggtgccgagggtcaggtggtccttgggctcgaagccttcggccgcgaagtcgcgaatctggccaaccttcttgacgaccacgtagtcatcctcgccgccttcgggagcttcgggctccacgatgttggagagcttccacatggcggtggtgtattcctcggctgcggaatcggccttggacttgtattcggagaccttctgggacagttccttggtttcggcgatgagcttggccttctcgtccgccggggcggaggcgaccttcttgccgatttccttctgctgggcgcgagcctcttcgaaggccttcagcgcctcacgacgtgcggtgtcggaggagagcacttcgtcgacgagctccacggactcgccgcgcttgcgctgggattccttgacgatatcggtgtgttcacggatgaattgaatatcaagcatgggcaccagactagccgcgtaagcagacaccgacaatggccgaatgcgcgggagtcacgcggaaatcacagggaagcccgggaaagtccgcggacgggtccacccggccaatttcgtcagatgagacgcgattgaaccataatcacgccccacggggctgttgcgtgcaggaaatgttcacgtacggcgcaccatggccgcaaacgacctccccaccgataacaataggagccatgcctcagcctgccctcaccgtgtttctgatcatcgccgcaatcgccattgtggtggtgctcatcgccgtcatcgtcatcgctctgcgcgcgcagcgccgccgcaagctggctcagacgctggagaagcgccgggacgacgaggtgcagtacgccttcatcgtgaatccgtccaaaccgcaggccgaagcccgcaggctgcatatccagaggttctgcgaggccaaggggctcaatcgcatccgcttctacgacacccagcttgacaaggacggcagggtctgcgcgcttgaggcgctggaggacggcgccgacgtggtgatcgcggtcggcggcgacggcacggtgcgcacggtggcgagcgccgtctccggcaccggccatgcgctgggcatcatccccatcggcaccggcaacctgtttgcccgcaatatgggcgttcccgtggacgatatcgacgccgcgctgaccgtggccacctcccacggctcccgcctggtggacatgggccgtctcaccctgctcgaccacccggaggacgaccacggccacgccttcctcatcatcgccggcatcggcttcgatgcggccatgatcgacgacaccaaccccgagctcaaggcgaacatcagctggctcgcctacttcgtgggcggcgtgaagaacctgttcgcgccgaagttccgcggcacgctgacagtcaccagcgccgacggctcgacccacaccatcaagaatctcgatttccgcacggtgatggccggcaactgcggccagattcccatgttctcgctgatgccggcggcatcctatgacgatggtctgctggacttcgaaatcatcgacaccaccggcggcatcctcggctgggccaacctgttcggcgacgtggtgcaccagacgatcatcggcaagcccgaacagaacccgctgtccacgaactcgaccatcgaacaggttcagggcgtcagtgccgaaatcacattggaaaagccggccaaagcgcaggtggacggcgacatgctaccggagaccaaacatattcgtttctcagtggatcatcgcgcgctgatcgtgcgcgtacccgacgcctccgcgctggaaaagaccgcacaggccgctgcctcaaacgccacctcggatttcgccgaaatgaccggcacgctcgagccgattcgctgatccgctacgatgcgtggccggtgactcgggcgacgtgcattgccagataggcggtttcgtcgtcgctgatatccgtgtcgaggcgcagttcgagcagggaggcgatggttcgcgcgcatcgtagcgcggcgggataggactcacgaatcaccttcatcaccggtgccggctcatccgtcagttgctggtgctggtggatgcgtacgaacaggtaacgcagatgggtgatgaacctgcccacattcacggaactgcggtccaacgtgatgccgtagctgtggtcgatgatgtcaagcagttgctggatcacgcccgtcatcgtatacgtataggacaggtcgccggtggcgaagccggcgttgaccagatgcatggcaagcgcggtggcctcgccgtccggcagcgtgacgtcgagccgcgcattgagcgatgcgagcatcgcacacccctgcgcgtattcctgcgggtacaggttgttcacctcgccgagcagcgggtaggtaatgtcgatgccgcgccgcacccgctccaccgcattcgccacgtgatccgacagggccatgaccagcgtggtgctgccggtctcacgctcccccagtccggcttcctgcatggattcgacgaccacgcggatgatttcgggcggaatgtccgccagcatctgcgccagatggtccgggtcacgcccgtccgacggcacgaaggtgcgcacgactttcgactcgtcgaccgtctgccccggcttggcctggaaccccagtccgcggccggtgagaatcacctcaccgccgtcgccgcctttggcgagcacgacgttgttgttgaacactcgcagtatttccatggcatcctttcgcaacgtcattgttccacatcgatgatcgggctgccggctgatacggttttgcaatcaccgccgttgttgtcgccgctaccgtcgccgatcaacggcgtgaccacggtcagttcagcggcgttgaccaccgtcaccaccaccacaacgctgtgcccggccgccgcgactttgccgaaatccacggtggccagtggctctcccgccgcgatccgctcgcctttagccacgaccacagcgaatccctcgccatccatatcgacggtgtcaatgccgatatgaaccagcacctcgatgccgccatcggttttaatgccgaaggcatggccggttcgggccacggttttcagcatgccactgaccggtgcgagcacggctgtctcaccggtcgtctccggcacgacgcctacgccctcccccagcgcgcgggaggcgaacaccggatcgccagtcgcttccagattcaccagccggccggcgaccggcgacaagatggcgttggagtcaagagcccgatcaggggcagcccgcgatggagaatcttccgcagactccacatccgacacggtcgtgtcaatccccctcgccatatcctgcgggcgtgcgttctcgtctgccgagaccatctgcgtcttgatggcgcgcgacggcgtgcggtacccgaacaacaccgtcaacaccatcgccattacaaacgcaacggcgatggacagcgcgtacacccacatccgatcgaacaccggaatcgtcagcaacgaggagaaggcgaatgccgtagtcgtaacgccccggaccatctggccggatggcagcacggacgggaacagccagccgaacaccgcgctggtcactccgccggccgcgcagccggcgagcagccagcggtagacgcggcggtgatgcagatggatgccgtacaggctcagttccgaaacgccacccagcaatcccgcgagcaacgcccccaccgcggtctgccgcatggccgaatccttgccgcgtacggccagcacgagtacgccggcggtggcaccgaagcaggcaaagttccatacacccatcggaccttggacaaagtcgtagccgagcgtctgaatgttcatcagtatcagggcgttcaacggccagtgcagaccgagcggcacgagaaacgggtagagcatcgggatgatgagcgcgaacaggaatggcacgtgcgcgttaagccatgctgtggccgctcccagcccgctgccgagccatattcccagaggcccgataaccagtatggtgagcgcaaaaacgacgaccagtgagaggaatggcacgaacaccagctgtacgctgtcgggaatgacgcgcttcagcccgcggtagaccacggcgagcacggcggccatgagcaatggtacgaagatgttgccgctgtagtcgttgagttggatcggtatgccgaacgccgacacggtgcaggtttcggtgccgaatacggcgttggccgagcattgaatctccccggagagggcgctggatacggacattccggacatcacgccagtaagctgcggggtcataagcgcggccataatcgcaccgccgagccaagggtcgacgtccagtttcttggccgcattgtaagcgatcataatcggcagaacggtgaacacaccctcccaaatcgccttgagtagtatccaaccggtggacgtctcgccatcaggcacaatgccgagtgcaacgatcacgttgacgatggcgatgaccagcgaggcaccgagtagcacgcccagaatcgggcggaacgagtcggacaggtagtcgaaaaacgcggcagcccgggcacgggcggcactgccccactcgcggatggtacgaggcatgaagtgacgggatgtattggctgggccgtgactctgctcggtgtcggtatcgcgcaatggtgcgacgtcgtcggaaaggttcggcgcggactgcgtaggctgcgttgactgagtggattgcgcggactgcgttggccgcgacgccgccgatggtaattgcgttgccggagtcaatcgcgctgcctgcatccgaacgatctgctcgtacaccgaggcgaccgctccgccgatgatgacctgataacgattgccggttcgcgggaatgcgccgaggactccggggatggattcgagaccgtgctggctgacctggccggcgtcgtccagttcgaagtgcagtcgcgtggcgcaatgggtcaggttggtgatgttcgcggagccgccgacggcatcaacgatgcacgccgcaatcactgcaggcgttgcgttcgatgcgttcgccacggttcctccttgctgccgtatgccactgtgttccattatcggcgctgggtgccccaaaagcacggcaatgccggcaaagcatcgcgaaacggcaactatgcgctacggtactccgcgatagcgttccgctatggtgttccgccgcacccgttctccgtatttgccgcagcgcccattccgacatcattccaccatgcagaatcctgcaatcgttgtcaaaaatcatcgttttttgctgcctattcggagtgtcgcgaccgagaaagtcgtatcctatctttcacacacgttgcgtagcagggttgttactcaaaatgaggcaagacctggagtgacgtggaatttgcgtatcgtaatatgcgaattccacgttgttccaggtcttttttgttttcgggcgacttcaggcaatcgaagcctgaccttgcatgcggcagaggggccacgcggcaggcgcggcccgtcaacggcgaaaggacaaggcaatgacgacgacggcatcacccgtatcgaagcagacggcatccgcggcacaggagaccggcgcaaccggtgcagcggccaccgcaatcgaaaccatcgaaaccggcgtggccggggtggcggacgcggccacaaacgcggcagcaaacgcaatcgaggacctcgaagccgccgaatcacgcggcttctccacgcgcttcccgctcaacagcgcattcatcttcaccttcggcgcgctcggcggcatgctgttcggtttcgacaccggcattatctccggcgcctccccgcttatcgaatcagacttcggcctgagcgtctcccagaccggcttcatcacctcctcggtgctgatcggctcgtgcgcaggcgcgctgtcgatcggcgcactgtctgaccggttcggccgcaagaagctgctcatcgtctccgcgctgctgttcctgctcggctcaggcctgtgcgcctcctccaccggattcgcgatgatggtgtgcgcccgcatcatcctgggtctcgccgtcggcgcggcctccgccctgaccccggcgtacttggccgaactggcgccgaaggagcgtcgcggctcactgtccacgctgttccagctcatggtcaccttcggcattctgctggcctacgcctccaacctcggattcctgaaccacaacctcttcggcatccgcgactggcgctggatgctcggttcggcgctggtgccggccgccttgttgctgctcggcggcctgttgctgcccgaatccccgcgttatctggtgaacaagggcgacacccgcaacgccttcaaagtgcttacgctgattcgcaaggacgtggatcagacccaggtgcagattgagctggacgaaatcaaggccgtggccgcacaggacaccaagggtggtgtgcgcgaactgttccgtatcgctcgtccggcgctggtggccgccatcggtatcatgctgttccagcagctcgtgggcatcaactcggtgatctacttcctgccgcaggtgttcatcaagggcttcggcttccctgaaggcgacgcgatctgggtgtcggtgggcatcggcgtggtgaacttcgtgagcaccatcgtggccacgcttatcatggatcgtttcccgcgcaagggcatgctgatcttcggttccatcgtgatgaccgtttcgctcgcggtgctcgccgtgatgaacttcgtgggcgacgtggccgtgctggccgtgccgacgatgattctcatcgctttctatatcctcggctttgcggtctcgtggggcccgatcgcctgggtgcttatcggcgagatcttcccgctgagcgtgcgcggcatcggctcctccttcggctcggcggcgaactggctgggcaacttcatcgtctcccagttcttcctcgtgctgctcgatgcgttcggcaacaatgtgggcggcccgttcgcgattttcggcgtgttttcggccctgtccatcccgttcgtgatgcgcttggtgcccgagaccaacggcaagtcgctggaggaaatcgaggaggaaatgaccaagcgctagacaaccggcacacgattcgcacaaaagttgacaactcttaacataatcgtacccaacgtggcgaaaaaacgtggcagaatagggagcatggtagcaaacaatgcgggtcagcccgccaccccagcagatctgatcaatgtcgatgaggttatcggcaaatactatgacctcgtccccgatcccgaagtccccgagcagcgtgtcatcttcggcacctccggccaccgcggatcgtccctgaagacctcgttcaacgaggcccacatcatcgccatctcccaggccatcgccgaataccgcaagaaggccggtgtcaccggcccgctgtacctcggctccgacacccacgcgctgtccggcccggccaagaagaccgccatcgaggtgctcgtcgccaacggcgtgcacgtacgcgtcgattcccgtgacgacttcgtgcccaccccggtggtctcccaggccatcctgacccacaaccgtgcggccgacggcacccagcgcttcgagggcgagggcctcgccgacggcatcgtcgtcacgccgtcccacaacccgcccaccgacggtggcttcaagtacgaccccgtcaccggcggcccggctccggccgagaccaccaatgccatcgccgctcgcgccaacgagctgctcggcgacttcaagtccatcaagcgtgtgccctacgaggaggccatcaagtccgagtacgtcgagggcttcgacttccgcgagcactacgtggacgacctggagaacgtcatcgacttcgacgtgatccgcaactccggcgtgcgtctgggcatcgatccgctcggcggcgcttccgtgaactactggccgctcatcaacgagaagtacggcctgaacatcggcgtggtgcgtcctgaggtcgacccgacctggcgcttcatgaccatcgaccacgacggcaagatccgcatggacccgtcttccccgtacgccatgaagggcctggtcgacgagctcaacgccggcgcttgggacaagtacgatctggtcggcggcaccgacccggacgccgaccgtcacggcatcgtctgcccgaactggggcgtgatgaacccgaaccactacatcgccgtgtgcgtggagtacctgttcggcggcaaccgtccgggctggcctgagggcgcagccgtgggcaagacgctggtctcctcttccctgatcgaccgcgtggccgcatcgatcaacgcgaaggtcatcgaagtgccggtgggcttcaagtggttcgtggacccgctgttcagcggcgaagtcgccttcggcggcgaggagagctccggcatgagcttcctgcgcaaggacggccgcgtgtggaccaccgataaggatggtctgatccccgacctgctggccgccgagatcaccgccaagaccggcaagaacccggcccagcttcaccaggagcaggtcgagcgcttcggcgagtcttggtacaagcgcgtcgacaccccgaccacgctggagcagaaggccaagttcgccaagctgaccggtgatgatgtggccgccacgcagctggctggcgaagacatcaccgccaagctgaccgaggcaccgggcaaccacgccaagatcggcggtctgaaggtcaccaccaaggacaactggttcgccgcccgcccctccggcaccgagaacatctacaaggtgtacgccgagtccttcgtctcccccgaggctctggacaaggtgctcgacgaggccaccgtcgtggtagacaaggccctgagcgagtgaaatcgctgcgttagtcgcgttcaccgcaactaataaggctctgcattggattcatgcaatccactgcagagcttttttagctcatatgcagttcgcgaccactgaaacacgcaggtcaacggttctcctcatgcaccgtgactgcattttctcaacatcactgcagggcaggacggccagatgaccgcgaaacgttcgcctgcctaccatcatcattgtggggtcacagcggccagatgaccgccgaagcgttcggtcggcttgcatcatggtcgagttttaacatcgttgtgggacgccacgacgaatttgcccattccagagttgccatcccacaaaagcgtgggacaacagctaagtcaatcgttttacatttccccccatcccacacactcaaactggaaaccccggaaagacaccattcctgccacacccgtcacagccattacccgaggggccgtgggatgccacgcaaaaatcggcaaaacacgcgtagcgtcccacacccattggcgcaaatccacgcccaatgcaccgcccccccccaatcgaccactatgacacatttccctccacaatcgaacactagtcattcacgaaatccatcactacgaggcatcgcaatcgaacggcatgcaatatcaagcacacaccacaacaacaggtcgtacaaatattgcctttacatcagtccgtttcgaacatcatggtcacagcaggctctgcgccaactcttcaagagacatggcaactacatgaaactcgaatacggcaccgcgcgaagcaagcgccctcgccacgttgaaagcgaattcagcacgagtatcctcgttagcgatacttgccgccgtggcgatgaagaccagccatctccgcccgaccagcatgccccttttctcttggtcacggcgccattgagtcttactcgtacgatgatgatcgccatcatattcaacagcgaccttgaactctggccacgctaagtccaacgttatgggagctccagatgcaaaagccgcgtccggcaccacatagttcgcaaccggctgtggaatcccatgcgccaccagagagagtcgttcttctgattctttgggcgaatcagcaccaggtgatatcagaggcaatgctcgaacgcaggacgggcgccctctgaatcgggtaaattgctccacgaacttcaccagatcctgatagattgcagcagcatcacgatccttggccaatactggctgtttgctcgtagcagtaatgacggcatccccgagcacaatcagagactcaaaagaaacatacggggcaagttgagcccatacgtgaaacaggtccagcgcaaacacgtgttggttcatttccacattggcggctttagccgcatgtttccaaatatgcgtttgcagtggtgcatggcgtgtacgaaaccgcttgctcttaacgctggatacagtgtgcagcttggccgagtcgaggtcgcaatcggcgggaatcggtacggattgcagagcgagggaagtggtcatgccgaaaagcagcttcttgcccgcccgtttcgcttcctcagtgcagcgtgcgaccatgtcgcgtttgcgctgggcgaggctttcgctcatggtcggtgtcgctgcagaatcatgtgcaccactgttcggcgatgacgagtcgcgagaagtcgggtatttcgagtcagtagaaaatgaccccgcaaattcaggcggaacaaaaaccgcctccgattcttccggaggctgatcgtatatagagcctggcagagctccatagttggtgatgccgtcggtcatcctgttcatgacaccaccatatgggtagtgggtgcggaaacggaagccgatccgaggtatgtggtcctagcttcacttacgcacattcattgtggataaccatgtggacacctcacttatacacatagtcatccacctcttcaaccccgatttgacacactaactgtatctgatatgattacagtatcataactgtacacatcatagttacagtatcgactcggtaaggaggtcgtttcatgaacggcgaccattcactggcagtgcacgcattggtctaccttgaccatcgcgccacacacctgcccagtcagatcctggccgagaacatatgtaccaatgcggcgcgcgtgcgcaaagtaatgcgaccgctcgcctcagccggactcatcgccactaaagagggtgctgaaggcgggtacgctctggcccggcccgccgccgaaatcactttgcgcgcggtagcggaagccaccggcaccacttttgtgaaagtgaactggacaccgggcgacgtacacgaggactgtctggtgtcatcttcaatgggcgcagtgatgaacgacatctatgccgggctcaaccgcacttgcctcgaacaactcgaacacaccaccatccacgacatcaccgaacagatattcagcgagcgcaaaggctaataatcccgcgcgtttcccctagccagcatcagtcgataacgcttcggcagtcaaagaagaaaacagacgccgcacggcacacaacacatcagcacggcgcacgacgtatcagcacaacgcactcttatcactcgaatatgtaaggaaatgaccatgtccaccagcacacccaatgccatcagcacacccagcacctcccccactatcaccaccgacgccctgatcatcggattcggcaagggcggcaaaaccttggctgccaagctcagtgcagccggccgcaaggtcgtcatcgccgaggcaagcgccaacatgtacggcggcacctgcatcaatatcggatgcttgccgtccaagtcactgattttgtccgccgaacaggcgcggcgggatggcgcgaacagtactcccgaaacccgcgaagcagcgttcgaggctgctatcaaggagaagcgccgcgtcacttcgatgctgcgcgacaagaactatcacaagctcgccgaccaagacaacatcaccgtaatcaccggccgcgctcacttcaccggccctcatagcgtggaaatcgccaccgctgagggcccggtcgccgtgaccgccagcaagatcttcatcaataccggtgccacgccgcgcattccggatattcccggtatcagcactacgcccggcgtctacaccagcactggactgatggatctcgacgatatgccgcagcgactggtgattatcggttcaggattcattggacttgagtttgcctcgatgtttgccgatttcggcacggcggttaccgtgctgcagcacaatgccgagttcctgccgcgcgaggatgcggatgtggcggccgcgattcgcgcacagttggaagcgcagggcgtcaagttcctgttcaacgcggataccaaggccatcgcgcccgctgctgacggcggcgtcaggttgtccgttgcggtgaagggtatgactcgcggcgcatcgcaagcttgcgattccacccccgccggcaccgggaacgctcataccgatatcaccggtgccgccgacgccgccgacactgcaacaaccaccagccccactagcaacccgaccgatcacgccacgatgtcacacgttcaaacgaaaccatcagacgatggcgagccgcggttcgccgaaccggctgaagcccgattctgcctgaccaccgacgcggtactggtggccaccggacgtacgccgaacgttgagggactgcatcttgaggcagctggcgtggagctcaccgaacgcggtgctgtgaaagtcgacgagcttctgcgcaccacagcagccgacatttgggctctgggcgatgtgaacggcggcccgcagcacacgtacatttcgctggatgactatcgcgtggtgtggtcgcagctcaatggttccgaccatccgtacacggtgaaggaccgcaagcatgtgccgtcgagcacattcctcgccacgccttactcgcgcgtgggattgaatgagcgcgaggcgaaggcggctggattggattatgtggtcaagcgattgccggtggccgctgtgccgaaggcccaggtaatgcggcgaccggatggtctgatgaaggcgattgtggaacgcaatactggccgcattctgggtgcgatgctgctttccgtcgagtcgcacgaggtgatcaatatcgtcaagttggcgatggatcttgacgcgccggccagcacgttgcgcgatatggtgttcacgcatccgacgattgccgaggcactgaacgacttgttcgcgtagtttgttcgcatagcacgcccgcgcagcatgacccgcgtagcgcagcccgcaacagactcccctaatgcgcgcgaaggtcctcatcgacgtaaaccgatgaggaccttcgcgctgtcgtcatgatccgtacgtgacagcaatcacgtccgaaccagccgttacttcaagccgagcttacggtccagaatgtcggaggcatccaatcctaagcggcgtcggatgaaccagccaagaccgagcggcaggccgggagccaaggccatgccgcctgaaccgagtgccacggttttggctaggtgtgatgttattcacactcttcactacgttgttttgcctcgcactgggcaaccccacttcagcaagagattgcacagcttgcgttagggtggagaacatgactatcacagtatccacagacggttccgcattagggaatccaaacgggccaatgggctgggcctgggccgatcatgagcagaacgccggcggcaagcctggccataagcacgacgaccacggctacgacgccggcggcgcgaccaacggcaccaaccagattggcgaactgtgcgcagtgttggaagctttgcgagcgcatccgggccctgagccattgctcatcgaatcggattcgcagtacgccatcaattgctcgaccaagtgggtcaaaggctggaagaagaatggctggaaaaattcacagaaaaaacccgtgaagaacaaagagcttattcaggcgatcgaccgtgagatctcgcaacgccctggtccggtggatttccgatgggtcaaaggtcacgccggcaacgagggcaatgagttggtcgatgaactggcacgcacctatgcgggcgattgccgttcgggtgcgcgcgacggctatctgccgattgaaggctggcagtcgctgctgggctccgaatacgcacatggcaccgatgtgcctccagacgtgcagttggtgctggatggcaaggcggatgcggcaagtttgcacaagccggctgcggcgacggatccgacggatgccacaaggccagagaccaagtcttcgtcacccttagcgacacaatcaacgcaacctgtacaatcaacacaacccgtacaccccgcaaagcccagtggtctgacggtatccggtacgctgaccttctcccccgcgccgaaaacgagcccgtatttcaacgggcagccgatgccgatcaaaggcagcatcgaaatcgaaggctatgtggacggcgacggcaacctgaccatcaccaacgcaccattcgtacgacactaacacccaaacacacgaatatgtaccgcaatcggacacgatgacacaaaatcgctcattcgcgttaggataggagataaggcttcacgccgttgatccatgcggcggaggcaaggatggcaaaggagaaaccatggataaggcacagcaggatgcgctgaagaaggcggccggcatcgaagccgccaagctcgttgaaaacggcatgatcgcaggcctcggcactggttcgaccgtgaagttcctggtggacgagctcggccgccgtcatcaggaggaaggtcttgagttcactggcgtgaccacgtctcgccgcacgcaggcccaggccgagagctacggcatcaagatcgtggacatcgacgacgtggaccacatcgacgtgaccattgacggcgccgacgaagtcgacaagaacttcaacggcatcaagggcggcggcgctgctctgctgtgggagaagatcgtggccaccaactccaaccagatcgtgtggatcgtggacgagtccaaggttgtggacaccatcggcaagttcccgctgccggtcgaggtcattccgttcggtgccggccaagtcatcaagaagttcgaggcccgcggctacaagccggtgcttcgtcttgacgccgacggcaaggaagtgcgcaccgacgagaacaacttcgtggtggacctgcacctggagcgcatcgatcacccgcaggagctggccgaagacctcatcaacacggtcggcgtggtggagcacggcctgttcctcaacatggtcgacaaggtcatcgtcggcgacccgaacggcccgcgcgtgatgaccaacgccaacaagtgatcgtctcacatcactaagcttttccaagcccgcatctgcacatcgcaggtgcgggctttactgttgcccgaacaaggcaaagagccaagcaaaagagaaaccccgcgaccataacgatcacggggtttctaatgccttgattgcaggtaagactacttacgctggtggcgggtcttacgcagcagtttgcggtgcttcttcttgctcatccgcttgcggcgcttcttgatgacagaacccatctgaagcctccatttcgattaatcgtaaaagttgcaactcgcaccataatacacgtgttgccagacagagggaaccagtatgttgccgatagtccgcatatgccctgaacgcagttggggcatccacatcagcaatgtggatgccccaacgttcataagtttgtgcagcagctgacagccgatactagatgctacatcgggaacttctggtagaagcgatcgaccgcttccttggtgccggtagcttggaagaccacggtatcgttctgccagatggcaacggcgttcttgctgttggaggcatcggccttcaccacgtacgcgcccgtgacgttgccggaaaccttgacgttgccggatgccgactcatcgccggtctgcgcagcgaccaacgcatcgtactgggtcttggcattgtccgccgacgaccactgcgcggcgaccagcgtgacatccttggcggcatcaccagtggagtaggtcagagtgtactcctcgagcggcgacgcggaattccacgtcgtggaggcatccgccttggtacgcgcgtaattcagcacgctgcccggcatggccttcaacagctcactggcatcatccggcaaagctgtggcgtcgatggtcggcttggtcggctcggatgattcggttttctgctggctgttttgggtggtagtggaggtgccatcattcttctggatggcccaacccggccacacaaaggccgaaagcactgccaggataatcacaacagctgcggcaaccaccactgcaatcaacttgccatgggattgcgtggtcgaggagttctcactattagtcatgccccgattctctcacagccgcgtgacgctaggcggccgtaattttagtcgttgtgcgcaagccgcgtgaaactcttgtgaacggtaaaaatttaccgtccgctggtgtttgggttagggtgagaccatggcgaaatcaagtgtgcagtatgtatgttccgaatgcggttggaacgggccgaagtggtacggccgttgccccgagtgtggtcagtggggcacggtcgaggaatttcacgaggctcggccggcggcaggctctcgcacggccgctcccggccgaacatcacgcacgcagtcggttacggttgccaacaacgccagatctgcagcccgtccgattaccgaagtgggcacggaaagcgtcgagcggctcggtaccgggttttccgaattcgaccgtgtgctcggcggtggcgtggtgccgggttcagtaacgctgatagcgggcgaaccgggtatcggcaagtcgacattgctgttgcagacggccggcaatatcgcgcgcgttgtggcgggagacagtacgttccgaggggcaggtcagcggtctgcccaacagtcgggccgggcgcagggcaacgcatcgaacacggtgccgatgcggggcaacgcatcatcaacacacgccaacaccgtgctgtacatttccggcgaggaatcacaggcgcaggttcgtttgcgcgcttcccgcatcaatgcggtggagccgaacttgttactggcctccaccaccgacctgtccacagtattggggctgatcgaacagaacaagccggccttggccattgtggattcggcgcagaccatcgtctcgcaggaggtcgatggcatttccggcggttcgactcaggtgcgcgaagtggcaagcgcgctgatagataccgctaagacacttgacattccagtatttctggttggtcatgtgaccaaggatggttcgattgcaggcccgcgcacattggagcatctggtcgatgtggtctgccaattcgaaggcgacagcgagactgcgctgagaatgctgcgagcggtgaagaatcgttttggcccgaccgatgaagtcggctgtttcgacatgagcggtgaaggcatcgaagaggtcaccgatcccgccggattgttcctgtctggagacggccctgatgcggccaacgcggcacccgtggaaggcacctgcgtgacgttcacattggatgggcatcgcagtctgcctatcgaagtacaggctctggtcaccacgtcggtgctgcccacaccccgtcgtgcggtcaatggcgtggaccccagccgtatcgccatgctggtcgcggtgctctaccgtcacagcaagctcaacctgctgtccaacgacctgtatatctccactattgccgggggccaggccaaggagcccggttccgacttggcgatagtggcggcactggcgagcgccgccacgtcaaaacccattgcgcgagccacgtgcgccattggtgagatttccctgaccggccaggttcgcccggtaccgcgtatggaataccgtctgcgcgaggccgcacgcctcggcttcaccacggcggtcattccgccactgcgcaagccggtgcatgtcgagggacttcggctggtggagtccaacacattgtccgacgccttagacgccttgggagtgcgtaaatagccctgagatatgcctcaggcggtaagacgcttggtctcctcgacgttgcgcttgagttcgtcgacgagttggtcggggccatcaaacttgacctgcgggcgcaggaagccgacgaattcgacgcgaaccttgtggtcgtacaggtcgatccattcttcagtgatgcagtaggcctccaccacacgctcattaaggccggttttttcactgaaggtgggcttggtgccaatggagatggcggcgggccaacggttttcaccatctaccagccaaccggcatagacgccgtcgaccggaatgtagcctgcaatgtcggagccaagattggcggtggggaatccgatggtgcggccacgctcctcaccgtgcaccacttcgccctcgatggagtgcggagcacccagaatggcgttggcgtcctggattcggccatgagccagcaggtagcgcacattggtggagctccaggcgcgcattgccttggcctggttcttcttgctccatgcgcggcgctcggctttggtggcattggccagcggatcgacgggctctccccattcgcttggggcttccggcttgaaatcgcgcggaatacgcacttcgcccgggccacggtcatcgaccacgtcaagctcgaatacaccggtggcggcggcaagattagcgatatgcttaacgtcgccttctcgacccttgcccatggcggcatcctgcccaaggaccagcgtacgcatgcccagcttgccggtaagtctgccaaggaagaaaatgtatgacatagctgcgaaggccagcgtgtagtgcaccaccagcacatggtccacgccgaactgttccatgcggtgcagtcgatcatccacactggtcaatgcttcggcatccacgttctgaaccgcgggctcttcgccatggtgtgaggcggcccagccgtgtacgaatgcggggcgcgggtcaaacagaatcaccacggaaaaagcatcatgctggtgcgcgagttccaccacacgcttgatcaccgcctgatgacccaagtgcatgccatcaaatgcgcccaatgtcaccacggccttcttatcgttactgaacgagggccattcaatcgaaccttcggcgtcaggggtcaggtgcgtgatatccatcagtgtgctgttccttttatccgtgcgatgttattcatgcaatatagacgttgttgtgcgcggcctgtatcaagctgcacttttcaccgcgtctactttacgcgagggggaatacggtgaccggcttggcctgatgagcgtttgcacgctcgataatcgccgccacatcatgcgtttgcggcacaatggcggcagtgggctcgctgattgtacgctcaatacggcggccgaagcgtaattcgctggcctcctcaggagtgatgtcaagcgccggcatcgcacctcgagcggcctgttccatggtaagggcatggtcaagcagccagttgcggcgctcgtcaccggcaagaccttcaggagtgtccaatacgcacttgttgcgcgtgacggtttgcccttcccgattagtgaacgtcttctgatcggtatgtgcggtgacggtatgggttcgcgtgtcaagcatcgcctcagaggcgataagtccgctggcatcgtctggcaacgcgaatcggccgactcgcgtacgacgcaaacgggtcaggtatccgccgacgccaagttcgttgccgaggtcgcgggcgagcgcgcggatataggtgcccgatgaacagctgatccgcacgtcaacatcaagtgcgggaatcgctcccgtgttcgcgtcttcccgcaatggttcagcggcctgctcccctgctacgaatccgctgcggatatccagcacggtgaattcgctgatggtgaccgggcggggtttgagttccacatccttgccttcgcgagccaagtcgtaggcacgctggccgttgattttgatggcggagaacgtattggggacttgttcgatatcgccggtgaaattggtggcgatggtgcgtgtgagcaggtcttgccatgaggcagttggtaacgccgttggttcgccgctctggccaccctcagtcagctgcgctgatagcgtttgccagcgggagcgggcttcatcatcgacaagcacctcgccttcggcatcgtcggtagtggtgcgcaggccgaggcgtatggtggcctcgtaggttttgtcatgcgccacgatgacgttgagcagtcgtgtggcgtggccgaaggcgatgaccagcgtgccagtggccatggggtcaagggtgccggcgtgaccgaccttcttgatgtgcaacgcgccgcgcacggcggcgacggcgtcgaaactggtcacgccttgcggcttgtcgatgatgagcagaccgctgggtgttgtatgaagcacactactcctcgtcagagtcgtcttcgaagtcgtcgctgggctcgtcgtcatgcttgtacggatcggcgtcgccggcgtactgggcggtggcgcgagcacgggcgagttcttcatcacgcttcttggccacggcgagtatgtcttcgatctcgtgagcctcgccgggcacttcatcgaacacgaattggagctgcggagtcaggcgcaggccagccttgtggcccaccagagaacgcaggtggcccttggcctgatcgagtgcctgctgggcgcgcttgcgttcgccttcctcgtggccttcgtggccgagctgggtccagtagaccttggcgatctgcaaatcgttggtcacacgaacttcggtgacggtgatgctggcgagtcgcttgtcatgcagttcgcgctcaatggaggaggcgacgacacgctgaatcaaggccgcaatacgtgcggcgcgcgggttggttcctgccataggaatttccttttctagacttgagccccctctgacgaggggctgccgaacgcagtgaggctgggggagagaaaatcatggaactaccatgtctctcccccagtcagtctgcggctgacagccccctcgtcagagggggcttaacaatgactacttgcgctcgacttcccgcatctcgaaggtctcgatgatgtcgccgagttcaatgtcgttgaaggtgccgaggttgataccagcctcgtagccttccttgacggactgaacgtcgtccttgaagcgacgcagcgaggagatttcgaggtcgttgaccgtggccacgccgttgcgcaggatacggcacttcgtaccacgcttgacctcgccgtcctgcaccataacgccggcgatgttgccgaacttggaggagcggaagatctcgcggatctcggagtgagaggtgacgacctcttcgtattccggcttgagcatgcccttgagggatgcctcgatgtcttcgatcgcacggtagatgaccgagtagtacttgatctccacgccctcgcgctcggcgaggtccgcgacctgacggttcggacgcacgttgaaaccgatgataacggccttgtcgaccgtggccaggttgacatcattctgggtgatcgcaccgacgccgcggtggatgacctggatgccgacctcgtcggatacctcgatcttcatcaaggaatcctcgagcgcctcgacagaaccggacgaatcgcccttgatgacaatattgagcatgtcgatctcggactcggcgaacttcttcttgaagtcctcgagggagacgaccttgcgacgcttggccagctgggcggcacgctcggtggcctgacgcttctcggcaatctggcgagcggcacgatcatcggaggcgaccaggaagaggtcaccggcggtgggcacggaggtcaagcccagcacctgaacaggtgtggacggaccggccgcttccatcggctgaccgttctcgtcgagcatggcacgcacgcggccgtacgaagtgccggccacgatggcatcgcccacgtggagcgtaccctgctgaaccagcacagtggccacggcaccacgacccttgtcgagtcgggcttcgacggtggcaccacgggcgtccatgtcggggttggcgcggaggtccagctcagcgtcagccgtgagcagcacggcttcgagcagcttgtcgacgtgcaggttctgcttggcggagatgtcgacgaacatggtgtcgccaccatactcttcagggaccaagccgaactcggtgagctggccgcggaccttctccgggttggcaccgggcacatcgatcttgttgacggccacgacgatcggcaccttggcggcctgagcgtggttgatggcctcaacggtctggggcatcacaccatcgtcggcggcgaccacgaggatcgcgacgtcagtgagctcggcaccacgggcacgcatggcggtgaacgcctcgtggccaggggtatcgaggaaggtgatcttgcgcggttcgccttcaaggttcacggtgacctggtaggcaccgatgcgctgggtaatgccgccggcctcacgtgcgatgacgttggtcttgcggatggtatccagcagtcgtgtcttaccgtggtcgacgtggcccatgacggtaacgaccggcgggcgaggcttgagatcctcgtcatcctgcagttcttcctcgtcaaggttgatgtcgaactgctggagcagttccttgtcttcctcttctgcggagacgagctggatgttccagccgatctcttcgcccagaatctggaaggtctcctcatccaaggactgggtggcggtagccatctgacccaggtggaagagcacggtgaccagcgcggcctggttgacgttgatcttctccgcaagatcggccagggacgcgccctgacgcagacggatggtctggccgttgccgttggggatgcgaacgccgccgatggtcggtgctttcagctcctcatactcatggcgctttgccagacggttcttacgggcctttgaagacttgccgccctgacgtccgaatgcgcctgcggcaccgccgcgaccgccgcgaccgccgccacgtgcgggaccgttgctcggtgcaccgccgccctggaagttattgccgccgccttggcccccacggaagccgccgcgtgcgccgccctgaccggcaccctgggagccgccgccctgacccggacggttgtggccccactggccgggacgcggaccgccctgaccaccttggcccggacgaccgccacggaagccgcggccctgcccctggccttggccgggacggcccggacgaccgccacgaccgttatcagcagtcggacgagccatcggatgcggacgcggaatatcacccggcgtcggggtgtgcataccctgcttgcgggagaacgggttgttgcccgggcgcgggccctgagcgtgcgggcgcggaatcgcatttgaagcggcattgccgccattggcaccggcgccgccctgagcgtgcgggcgcggagccgaagcattgccgcggttgttctgatgctgaaccggctggccattgttcggacggccctggttgttacgacgatcgttgttacggcgatcgttcgggcgactctgacgaccgttctcacggccttcgcgattatcgcgaccattctcacggttgtcgttctgaccgtggcggccgggggtcggcatgccggggcgtgcgccgccctgcggacgcggtgtcggtgcacccggagtcggagcctgctgatgtgccgaggcaggcgatgcctgacgtgcgggagcggccggagtcggtgcggaagatgaagtggaagccggggccgaaggtgcggccgggcggcgctgctgcacgggcttggaatcgcccttggcgttgtccttggcgaactctgccttcagacgccgggctaccggcggttcaatcgtagaagaagcggacttgacgaattctcccatgtccttaagcttctcaagcacggttttgctatcgacattcaaaaccttagccagttcgtatacgcgtggtttcgccactaattactcctattctgtgaccacgcgcgtgcatgggcgtggtcagttggtgatgacggcaagcctaccctgtctcatcgtgcgaccatgatcgtgttacctcgtctctggtgtgggcgatttcgcgcacactgcgccagcccacatacgccaatcaagcatactcatagcgctggatagcgtagacgcagcgagccgcgccattgctgacgcggctcgtatcaggaaataatgcgccctgaagatcattcaccttcgagcccggcggcctattcggcttccggagcagcagcctcggccgcagcctgggcggccttttcggcggcgaccttcttggcatgggcctcggcggattcgatgccgatcttccagccggtcagcttggctgccagtcgtgcgttctggccttccttgccgatggccagggacagctggtcgtcgtggatgaaggcgatggcggtcttgttcttctcgctgatcacctgcacgccggtggccacagccggggacagcgcggctgccacgaacttggccggatcgtcggagtagtcgacgatgtcgatcttctccgggccaaggttctccataacggcacgcacgcgagcgccgccggggccgatcagcgcgcccttcgggttcacgccatcggtgttggccttgaccgcgatcttggtgcgggcgccggcctcacgagcgatggccatgatggacacggcaccggagaccagttccggcacttcgcgctcgaacagcttgcggaccagctccgggtgggagcgggacaccacgatttccgggcccttgatgccacgggccacgttcaccacgtacacgcggatgcgttcgccgtggcggtaacgttcgccgggcacctgctcacggcgaggcagaatggcttcgacatcgcccatcgcgacatgcacgttggaggggtcggaagcatcctgctggatgatgccggtgatgagcttgcccttttggccggagaacgcaccgaataccttctcatcttcggcgcggcggaacagctgggtgatgacctggcgtgcggtggctgcggcgagacggccgaagtcacgcggggtgtcatcgtattcctcgcccagcttgggaacggggtaagggttgtcttcggtgggttcgaccggaatttcgtcggcggcccacacggtgaagttgccggaacgttcgtcaagctccacgcgcgcgtgcttggcggcgtgcggggtcttgaggtaggcgaggcgcagggcctctgccagcgcatcatccagggtttcggggtcgattccttgctcggcggcgagcttgtgtattcctgtcaggtccagttccatcgatccgtacctcctatgaagttatgtggcgcatggcctatgagtagtcacagttagctattagtgtatgtttccatgcagacacgcttctcttcaggacggtttacccggcgcttggcatccgtactatgcgcgagcgcgatgctgtgttcgctttcggcgtgttcgatgccgcgattggccggacgggccgaggcggaagctcaaatgaccccttgcgagaaagcgatgacgttggcgaactacgccacccatccggctgaaggcacgccgttattagagcagtatgccaccggtctggccgcccccctggcttggattgacgttgccgggtattgttcgggtcgttttgccgagggaacgttacgtgacgcgcagaccaagcaatggatggcttttctggccgataaattcgggcagtccgcgcccgaggtgacgccggcgcgtcttgatggcgtcacgtccgccaacgttgaccgatcggtattggatgcgatggccgtggccgaggatcgcgccggattcgctatcgaggtcttggccgcacgaggacagaccgctggggctacgttggcgttgagtgatatgcataagaccgccgggcaacagttggttgcgctggcgaacggcaattttgatgattccggcgcacaatccagttcttccggccaaagcgacccccgccaaaaggtctatgccatcgaccaactactggccaaccccaccaccatcgccgacaaggcaagcggccaaaccgtaccgaccgccgccgccatcgaaatggactgcgcccgcgcgcagatcaaggccgtgaccgaatcgaaatcttccaccgagagcgatatgctgctcatcctcgccgcactggccgccaagcacgcctacaccgcgttccaacttggctacccagcgactgacgccgcattgttcgagtagacacacactcctcacgaagccgatgcgaacttgttggatgctagtgggcaagtcgagttgaggcacgttccaccaatgtgaaatcggtggtgtacgtacgggccgggcctgagtatccttcgatgcggtcgataagcatgtcaacggcatgcttggcataatcgtcgatatgaggatcgatggtggtcagcgccggcaccgagtactcggcttccggcacgttatcgaagccgaccacttgtacatcgtcaggtacacgcaaaccacgtcgttgcaattcatgaattgcgcctaaagcaatggcatcattgagacacactacaacatccgggcatgggagcttgtctagcatagcttttgtcacgcgcataccttcacgctgattcatgctttctgccggaatcacataccgccaattcaccgataatccgcgctcttcaaatgccttcacatatccttgggcgcgtaacgcctgggtcccttccgtctgacgacgcagcactgcctcatccaccagttcaggaagaacacccatcagagcaaccgtttgggcaccttcatccaaaaatcttcctacaaccgtggagatggattcaatgttgggcatggtgatccaatcgcttttcccgtaggccagatggtctccggtcgttacaatcggatatggctgctccagaacggccccttcatccgcgagcggcgacattacgaacagaatccatccttccgcccctaaacgataggactcgtcaacgctggcaaccaacccttcaccgtcggaaccatatgtgttgatgactacaccgtaatggcgttcttttgcgtattcaatgaccttgtcagtgaaaaaaggaacgaacggctgcgagaaatcgaagatgttgagtccaataagctttgtgccgccagatcgcattgcacgcgccgaaatattgacggtatatccaagcttacgcatcacctcttccacacggcgacgtgtatccggtctcatactgccagtgtcattcagcacattggaaaccgtcttgatggagacgttcgcctcacgcgccacgtccttgatagttacgcggtttcccattgttcgaatccatttctgcttattacatgacacaccttcaacagcgtcattatgttcttattatggtaagtcacagtcgggtcgagcatctcctcctcatatcggaatcatctacccctcaacctcagaattcagccaaggagctttcctccgttggaccccatgcaccattaggcaaatatccttctgacaatactgcaggacgatcgaacgtagaggttaaactttctggttgaagaaacgcacgcacgccatccgaacaagggactttctgaccgccggctttcaacctagctttttacatacccgtcttttctccttattcctttgttgggtatcgaattgttccagtcgatgtgaatgacggcattgtcttcctttgactggtatgccacattacattagtggcgaatccgaacctctctttctgcaatccgggcatgttgatgattgtttgggtattgcttggtggttgtacagggcacagcaaccataagagactgcgccctgtcatgcgccaccgtcactcgaatcacttcacgtgcacggcggtccaggagaccggcggcaaggtcacacgcacagtgccggtatcggcgtcggacgtgatggtggtgttggggtgcagaacgactcggttctggtcttccagcgtgttttttgccagcagatcatcctcgtgcagggtttgcgcctcgaccgcggaaagtgcgaatccttccggcagcttgatggcaaagtcattggccgcttccatggagcgattgaccacaaacacgctgatcgtaccgtcctcaccacgcacggctacggaattgatcgtcggcacttcaccgtatttgtcggtttcatacgttccggaagccagtttcggttcaagcaccgtgccgcccttggcgagctttgcggtcagcgagaacggatagaacgtggtctgacgccacgccgggccgcccggttcggtcataatcggcgcaattacgttgaccaactgggccaggctggcggcgtgcacgcggtcggcgttcttgagcagggtaatcatcaaatcaccgaacaccacggcgtcggcggcgctgtacacatcctcgagcaggcgcggggcaaccggccaattgccgatgccttccggattcttgctcggctcttcgttgagataccagacattccattcatcgaacgagatgaacacgtcgtgcttgctcttcagccgggccttggttgcatcgatggcggcggcgacatcgttgatgaaaccgtccatatcgacgcccgaggcaaggaagctcttcatgtcacgggtgccatcaggctgaagttccggatggtagtacgcatggcaggagacgaagttgacgttgtcaaacgtcttctcaagtacggtttcttcccacttgccgaaggtgtccatcacgtggctggatgaaccacagaccaccagttcaacgttcggatcgatggcgcgcatacctgccgccaccgaggccgccaaggtgccgtaatcctcggcggacttgtggccggtctgccacgggccatccatctcattgcccaagcaccacatcttgatgccgaacggctgatcggcaccattggcgcgacgctcctcggagagcttggtgccgccgggaatattcgcgtattccaacaggtcgagggcctcttcaagaccacgggtacccagatttacggcttccatcagctcgttgccgccggttttttccagccatttcgccatttcgtgcagaccaaactgattggtctcggtggaatgccatgccaagtccaggcgacgcggccgctcatcacgaggaccaacgccatcctcccagcgatagccggaaacgaaattgccgccaggatagcgaatcgtggtagcgccgagttccttgaccagttcgatgacgtccttgcggaaaccgtcttcatcggcttcggggtggcccggctcatagatgccgtcgtatacgcagcgacccagatgctccacgaacgacccgaacagtctgtcgttgaccggagctacttcaaagtcattatcgacgacgagtcgagattcctccagctcccccggtttattgtcgtgcgaatgctcggacatgtgctctcctttaatcgttgtcttcaataccgcaagacaacgttgtgctaaataccaaaagcaatcggcccatcttcttggttcacctgttttgcggcatcgccaatcagcggtgaatgtgcgttctggatatttaatacaaccttgtacttctgttgatatcgataatacgatggttgtacttagtacgcaagtcccgctgagtacaacgttatccttttcgctattttccacccgacacgccgtatacgatacagcacaggagcgaatacggacgttcgtatcaaaaacaaaaagggttccgggacaaacccggaaccctaaaggcggataaggcgagattcgaactcgcggaggctttcacctcacacgctttcgaggcgtgctccttagaccgctcggacacttatccatgctgccaaaatggcaacttgttcattatgccacattctgccgacctggcaaatcggagtttcgctgagctcgattcggcgtgggataatgcgattttgtgtgagattgcgatgggtcagacgatgagccgattaacagtccgaattggtcaactgcgaaaatccgaattcttcaactaccaaaatccgaatattggtggtggtagaagcggcggcggggccactctgcattgagtggtctctccctcggtcagccttacggctgacagctcgaacgcaattaaggacagctttccagctgccattttatttgctcactgtcgttcgccttcgcctaaaaacgcctccggcgttttcttcacggctcagctcatcagagggggcttggaattttatttatgccacctgttcgtggacggaggcgttgacccattgggactgctggacgttgtatccagagaagatgccgatgtcgagcatgcagtcgcggtaatcgcggccgtgggcgatggtgatgtagctgtcgtccaccaatcggttatgcgtgggatccagtccgacccatcggccatcctgatacacctcgacccaagcatgggtcgcgccctctcccccaagcaaaccggcaatgtagcgcgcggtcaatcccacatgccggcacacggacagcatcacgtgcgcataatcctggcatacgcccttgcgctgagccaaggcctgttcggcggtggtgcgaatcgtggtggaaccgggcgtatacacaaacgccttgtagacctcatccatcacttcggcagcctgctgcaccggagtggcgtcggaaggcagcgccgccaagcgttcgcggcatacggcaatcatcgcctccacgttcgggccgggaatggtgagcgctgaattgaatcggtacagcggtttataggcttccttatggatatgcgcattgtccacgaaggcgataccggtcaccgagtagctgaatatgtcgtgcggctcagggatgaatccggtcatcaccacggagtcaaaggagtcgatggtggtttcgagttcggtttcgggctgaatcttcacttccacgtcaatcacctgttggcgagggccagtggagggaatacagcgaagctggaacctgtgatcggtgaccggtgcgctgaaggacagcctcatctcatagtcgaacacgagttttttcacaacgtctcctgcacttacacacgagccggcaaccggcatattctcgggataacaacactacagccatggctgaggtatggtccgtgcgctcacagcccacgcatatattccggcaatctgctgatatgcacaggccggcactcgggcgcacggttttttcgccataccaccatagcatttgaacccgtcagggtgtcaggtcgggatcagggacgcttggcgtccatgttcatggagctcagtgagcccatgtctttgatggccagcgcgctgacacggccggagtagtcgtcaaggtacttcttcagcaggtcggcgacttcctgatatccgcgagacggcagctgaccgaccagccagctcagtccgtcggcgaagcagctgggcagcggcatgccgtccaaggtcatcgaataggcggcgagcttcttgagcggcgcttccagctcctccatcgtcaggccgaagcgcgtgtacaggtcgatgcgttccagatatttgccgatgaagatgaacgccttcagcgtggggtcgaccggcgaattctcgatgccgccccagaaagcgagcatgtcatcggtaatatcgcgctgcttgtagatgtcctcggcatcggccgcgtatttggcggcatcggtgatattggtcatcgccaactccacgtactgcagcagacgcgagctcaattccgggcgcagaatcacggcgttgttgaatgcggaagttacggccgaccgcaccgaatcaggattggacccgtcgtacaggaagctgttcacgaacccgtcgaagtcctcgaaatcttcgggcaggtcgagtgcgtgagcgaacggacggaaggcgtccacatcggtgtccatcacacgatcgtagaacgggaagaactggttcagcgtggtgaaggcgcgctcggtgtatcgacccagccaatacaggttgtctgccttggaagcggtaaccagcgacaacgaatggtggcgggactggctcagcaggttcgccacctgcgtttcggcaccgtactcgtgctccacgccggattcgggtgccaacacccacgtatccttaaatccgccaccctgcgacgagttgacaatcatctggccgggcaccgacgagtatcgagtcaagcccgaataccacacgtgcgtattcttgccggtgaccacgaaggcacgcaaatcgcacttgcgcggcgacatctcgccggtcttcgggtccaccacatcgatatcacggaactgaatcacctcttgggcaatgaatcgacgcggctcctccttgatccggttggcgagctcctcacgtgcggcggcatccagcgacgaaccaaacaccacgccgtaaccgccggcttcggccacatccttgatgaccagctcgcccatccgattcaggacttccttgcggtcggcctcgaacatcggcatgtacgtgggcgcgttgttgagaatcggttcctcgccgagatagtacttgatcatctgcggcacgaagtagtagacggccttgtcatcggccgcgccgttgcccggcgcgttgacgatggccacgttgcccgcgcggtaggcggacaggataccgggcacaccgatcaccgaatcaggattgaaggcgaacgggtcgaggaattcgtcggacaggcggcggtagaccacgcccacacggtggcgtttgccggcgtagtcgaggaagtagaccttgttgtccaccacttcgaggtcctcggggaaggccaacgccgcaccggttttctccgccagataggcgtgctcgaagaacgcggaattgtagcggccgggagtcagtaccacggcgatgccctcggtggagacaaagtccatggctttgcgcaacaggcgcgggtattcgcgattatcgcgaatacgaacgtcgcggaacaggcgcggggagatgcggcgctcgatgtcgcgcacgaacagcgggtagctggcacccgaggggatgcgcaggttgtcttccagcacccaccagcggccgtcctcgccttggaccaggtcctcgccggcgatatgcgcgaaaatgccgccgggaggggtcacaccgttgacctgcgggaagtagccggccgaggtgtatacgtattcctccggcaccacgccgtcatggatgatggccttgtcggagtagatgtccttcagataggcgttcagggcgttgacgcgctgcttcaggcccttctccaattcgtcgtattcgtcggattcgataatgcgcggcacagggtcgtacgggaacagccggtcatggtattcgccgttcttgtagatgccgaaacgcacaccgttgcgggacagctctcgattgatcgcttcgcgacggtttaccagttcatgggccagtctgcgtgctgcggattcgatcatcgtgcctgctccttgctgtggcggcttctgtggcttcaagcggttaggcgttttgagcgcacgctgacgccgcaagccgtaaccgggtttgatggtttcaacctaaggcgagcccgtttcaacaaacgcgcgagaatgttacaggcaggtcacttcgccggccgcgtgcatcttgacgaccgcactcgtctcgccgaccacacgcatcttgccgaccgcacgcatcttgccgaccgcactcatctcgccgaccacactcgttacaatgaatggctatgacacgactgcgcattgacttggcctacgacggcggcggattctatggctgggccaaacagcccaatcttcgtacggtgcaaggcaccattgaagatgcgctgcacaaggtgctgcgggtgccggccgatgacgcggccgaaccgttgcgtctgacggtggctggacgcaccgacaccggtgtacatgcctcccaccaagtggcgcatctggatgtatccgatgaggtactgaatcgctgcgtaggtcacatgaccattccggtcaccgaggcgctgactcgcagactcaaggctgtgctgccttcggacatcgtcattcatggcattgccgtagctccggtcggcttcgatgccaggttctccgcattggagcgcacttatgtgtatcgggtcgccgatcgttcgtctgaggtcgacccgcgcctgcgtggatgcgtgcttaccgtggatgaagcgctggatctggagcttatgaaccgcgcagcctcattgaccatcggcctgcacgattttggttccttcgccactccgaatccgggaggcactacgatccgtgaagtcaagaccgcctattggcggcgggtgccgatcactcccctagtaccggatgagatggcatcgcatgaagcatatcggactccgtcgctggagtccggcctggtagtgttcacgattgtggcggacgcctttgcccgcaatatggtgcgctccctggtcggctcatgcatcaaagttggttcgggacgcaaatcactggagtggtttgccggcaaaatggccaagccagtacgtgaaggctcaagcgggccgattgcgccgcagggcctgactttggagcatatcgcatatcccgccgatgatcagctggccgcaagagccgaggccattcgggccgtacgtacgttgtagattctatgaaaacaacgcaaaagggctggaacccaaacggattccagccctttcagctagcttagcgaaacgctattcagctcactcggccttctcggcgtcagcggcttcctcagcggcggcggtctcctcgaccggagcctcaacagcctcagcagcctcagtggcctcagcctcaacggccggagcttcttcttcggcaaccttggcggcggcttcagcttccttcacaacagccttcttggcaaccggctcggtgacgagctcgatcacagcggccggagcggcatcgccaacgcgcggagcgatcttgacgatacgggtgtagccaccttcacgctgctccatctgctcggcaatctgggtgaacaggatgtgcaccacggacttgttgcggatgacgcgcatcacgcgacggcgggagtgcagatcaccgcgcttggcgaaggtgatcaggcgctctgccagcggacgaaggcgcttggccttcggcagcgtggtggtgatgcggccgttctggaacaggctggtcgccatgtttgccagcatgaggcgctcgtgtgcggggctggaagccagacgcgggcccttcttaggtgtaggcattgggtttactccttatatgtccgttcttcaggcaagcaggtgggcatatgcccgaacatctgcttgcctagtgaacgaacgattggtcaaagaggcagatcactcgtcttccggcgagaagaacgtgccaccttcgagattattggtatcgaaggccatcggcgaggacttgaggctcaggcccaaggtctgcagcttctccttgacctcatcgattgacttcataccgaaattgcggatgtcgagcaggtcctgctcggtgtgggagacaagctcaccgatggtgtggatgccctcgcgcttgaggcagttgtaagaacgctgcgtcaggttgaggtcctcaatcggaacggccatctcggggttggtctcctcggccaccggggccggaccgacctcgacgccttcagcctgggcgttgagctcacggcacaggccgaagagctccaccaaggtggaaccggcggaagccaccgcgtcacgcggggagatggcgggcttggtctccacgtccaggatgagcttgtcgaagtccgtgcgctgttccacacgggtggcctcgaccttgtagctcaccttgagtaccggggagtagatggaatcaaccggaatacggccgatctcatcgttgtcctgcttgttcatctgggcaggaacatagccacggccacgctcgacagtgaactcgatctcgagttcgccatcgtcggcgagggtagcgatgtgctgctccgggttggcaatggtgacgccggccggcggggtgatgtccccagccacggcttcgcccttgccgctcttgcgcagatacatgaccacaggctcgtcgtattcgctggtgagcacgatgcccttgatgttcagcaggatctcggtgacgtcttcctggacacccggcagagtggtgaactcatgcagggcaccggaaatacgcacggaggtcacggcagcacccgggatggagctcagcagcgtgcgacgcagcgagttgccgagcgtgtagccgaagccaggctcgagcggctcgatggtgaagcgggagcgctgcggattcagagattcctcggtaagagtcggacgctgtgcaataagcactgtggttatcctttcagcttgaactcggtggtgcactcaccggtcaggcggttttggatggatttggtattgctgagtgctcagacgcgacgacgcttcggaggacgaacgccgttgtgggcttgcggggtgacgtcggtgatggaaccaacctcgaggcccgcagactgcagggaacggatggcggtttcacgaccggaacccgggcccttgacgaacacgtcgaccttcttgacgccgtgttccatcgccttgcgggcggcggactcggcagccataccagcggcgtacggcgtggacttacgggagcccttgaagccgacatcgccaccggacgcccaggacaccacggcgccggacggatcggtgatcgaaatgatcgtgttgttgaaagtggacttgatgtgagcctggccgaccgggaccgacttgcggtcgcgacgacggggcttacgagcggcttgcttaggcgctgccattgaccctcgtttcctagtaacgaactttgttgttgacgttcgggcgatgggatgaaaatcatcccgtggcccgaatcatgccaccgactacttggtggccttcttctttccggcgaccgtgcgcttcgggcccttgcgggtacgagcattggtcttggtgcgctggccgcgcacaggaagtcccttacggtgacgctggccttggtagcagttgatctgaatcttgcgacgaatatctgcatcgacttcacgacgcaggtcaccctcgatcttgtagttggcttcgaggtagtcacgcagcgtaatcagctgctcgtcggtgagatccttgacgcggatgtccgggctaataccggtcgcggcaagcgtttccttggcacgagtgcgacccacaccgaaaatgtaggtgagggcgatctcgatgcgcttctcattggggatgtcgactccggcaagacgtgccattgcgattccttcttgttgccgtaggtcttgcacccgctcgcccggttacccggcacgggcctacgtacccgtggttcagtgtcgttcccttgcgggaagcactgtgagagagtgccttatttacttagtgccgctggagaatctgctctcagccctgacgctgcttgtggcgcgggttgacgcagatcaccatgacgcggccgtgacggcggatcacgcggcagttttcgcagatcctcttcacgctagggctgaccttcatggttatccttttcttgtgtacctttacttgtaacggtacgtaatgcgtccgcggtccaggtcgtaagggctcatttcgagcacgacacgatcctgcggcagaatacgaatgtagttcttacgcattttgccggaaatcgtggcgagcacgatgtgcttgttttcgagttcaacgcggaacatcgcgttaggcagtgcttccacgacctgtccttcgacttcaatcacaccgtcttttgccatgtgcctctagtcctattccgttggatgattactatggcatatccgaagacacaccaactgtcaactatatacgcacatacccctgtacgaacactcggcgtgtcgcacaggggtatggaaacgttgatgtggtatttcggcatcactccggcttgttgcccgggttgccgaacctactactcgaggtggctgatgatacggccgctgatctcgtcgatgtcgccgacgccgttgaccacgacgagcaggccacgggcctcgtagatgtcgagcagcggagcggtttccttctcataggtctccaggcgcttggcgatggcctccggagtgtcgtcagcgcggccctgctcggcggcgcgcttcttcatacgctccagcagcacgtcgcgggcggcttcgagggccaccacgtggtcgagcggagtgtcgaggtcggcgagcatctcgtcgagagcggtgacctgggcggcgttacgcgggtagccgtcgaggatccagccgttcttgcagtcttccttggccagacgatccttgacgatcttgttggtcagggagtccggaaccagctcgcccttgtcggtgtagctcatcgcctcaaggccgagttcggtcttgttcttgatgttgtagcggaagatgtcgccggtggagatggtggggatgttgaagtgttcggcgagcagagcagcctgggtgcccttgcccacgccctgagggcccatgatgagcagacgcatggtggtctccttttatgtcggttattaatacggttttggctcccttggttaagggagccattgagttatatgcggaagaaagattgctccatcgtggaacagtccactggactgttccactcctcgcgcggccgcctgcccattgcggacggccgctgccaagcgggcgtcagccctctttgtggtccacgttttcgaacaggaagccggtgtactggaactgttcggtctgggccttggcctggcgcagggtgtcgaggcccacgcccgcgataatcaggatcgtggtgccaccgaacggcagcttggcgttgaggccgagggccatgatcagcacggtcgggatcagggccacgaacagcaggtagacggcgccgacggtgttgagtcggttcatcacgtaggtcaggtagcggctggtggcgttgccggcgcggatgccggggatgaagccgccgtactgcttcatgttgtccgcggtctcgtccgggttgaacgtgatcgaggtgtagaagaagcagaagaacacgatcatcagcgcgtacagcgcgatgtaccacacggaggtggtgttcgccaggttggcgttgatccacttgacccacgactggtcggacttgccgaactgggcgatcagggtcgggatggcgaggatcgaggaggcgaagatcggcgggatgacgccggacatgttgatcttcagcggcaggtaggtggaggagccgccgtacatcttacggccgatcatgcggcgcgtgtactggaccgggacgcggcgctggcacagttcgacgaagtcgacgaagatgaggatgaccacgagcacgcccacgacgatgccgaacttgagccagtcgccgtcggtgccgttggtgccgtagccgatctcccacagctgcggcaggaagccggagcagatggacatgaagatcaagatggacatgccctggccgatgcccttgtcggtcacgagctcggccatccacatgatcaggccggtgccgccggtcatgatgaggaccatgaccacgaggttgaacacggagccgtccgggatgacctggtcgcactggtagttgaacagggcgccggagcgggcggtgaccaggatggtggtggactggagcacggccaggccgatggtcaggtaacgggtgtactgggtgagcttggcctcgccggactggccctccttgtgcagggcctcgaagcgggggatgaccacgcgcagcagctgcaccacgatggacgcggtgatgtacggcatgacgcccagcgcgaagatagacagctggagcatggcgccacccgagaagaggttcaccagtccgatgaagttctcctgggaggcgccgccgatcttggccatgcacttgttcacctctgtgtagtccacgccaggggtcggaatgaacgaaccgatgcggtagacgatgatgatgaacaggacgaagagaatcttcttcctcaactctttggtcttcagggcctggattagtgtcctcacctggatttcctcccaatagcgcgccaatcgcgcgaaatacacaaactaacgaacgagcatagtctaaagtgcctacttcggccacttcatgtctcgcgaatgttacctgaattatgctccgtcgtactgaacggggggaagcatactcaaaacgatcattgtgttgagactgcttctctgcactcagaacaacaattttttagaaaagggaacccccgtccacctattggcgggcgggggttgtacagcctattgcgctccccgtaggactaatcagtcctcggaaacggaaccgccggcggcctcgatcttggacttggcggaagccgaaaccttaacacccttgagggtgaaagccacggtggtctcgccgtcgcccagaaccttcaccggagcgttgtcacgaacagcgcccttggcgatcaggtcggccacagcaacctcgccgccctcggggaagagctccacgagacgagcgatgttgatgacctggaactcgaccttgaacgggttcttgaagccacgaagcttcggcaggcgcatgtacagcggcagctggccgccttcaaagcccggacgcacgtggttgcgcttcgtctggcccttggcgccacgaccggcggtcttacccttggagccttcaccgcggcccacacgggtgcggtccttcttggcacccggggcgggcttcaggtcgtgcatctgcaggatttcgttatctgccataatcagtcaacctcctcaacggtgaccaggtgacgcacggcgttcaccagaccacggttggccggggtgtcctcgcggacaacggtcttaccgatcttgttgaggccgagggtcttgacggtggcgcgctgagccggggtacggttcacgatgccgtggtgcagggtaatcttcaggttcttagccatgagtatcactcaccatccttctcttcggcggccttagcggcagcagcctcttcgcgagccttgcgagcctcggcaatgccggcggcgcgggcgcgcagcagagcatcgggagcgacctcgtcgagcgccaggccacgacgggcggcgatctcctcgggctcttcgagctgcttgagggcgtcgacggtagcgcgcaccacgttaacggcggtggcggagcccatcgacttggtcaggacgtcggtgatgcctgcgcattccatgacggcgcgcacggagccaccggcgattacaccggtacccggggcggccggacgcagcaggacggtgccagcagcgtcgtgaccctgaaccgggtgggtgatggtgccgcggacgcgaggcacagagaacatgtgcttcttggcgtccagctggcccttggcgatggcggccgggacttcacgggacttgccgtagccgacacccacggtgccgttgccgtcgccgaccacaaccagtgcggcgaagctgaaggtacggccacccttgtgggtcttggacacacggttgatggtcaccacgcgatcgagcagctcgtcgccgtggttttcttcacgacggttacgacgctcgccacgacggccttcaccgcgctggccacgacgacccttgcggtcctcgttgttggattcggtcgccacagtgttctgagtttcttcagccacttgggtttccttcgtttcgttgtcgctcacagtgcaagacctccctcgcgggcgccatcagcaacggctgcgacgcgaccggtgtacttgttgccaccgcggtcgaacacgactgcggtgatgccggcagccttggccttctcggcgatcagctcgccgaccttcttggcggcctcagtcttggtgccttcgaagccggcgaagtcggcctgaagagtggaggcggacaccagggtaatgcccttggtatcgtcgaccacctgagcaaccatgtgacggttggagcgggtgaccaccaggcgcggacgctcgggggtaccggagatgcgcttgcggatacgcgcgtgacggcgcttgagagctaccttcttgccttttccgagaatagcaacgctcatatcacttaccagcctttccagccttgcgcaggatgcgttcatcggagtacttgatgcccttgcccttgtagggttccggagcgcgcagcttgcggatgttggcggcaacctggcccacgacctgcttgtcggtgccttcgacaaccacgtggttggcgtcggtcaccttcagggtgatgccttcgggcgggttgacggtgatggtgtgggagtagccgaggaagaactcgatgccctggcccttggcgacggcgcggtaaccggtgccgacgatctcaagagtcttggagtagccatcgtgaacacccttgaccatgccggccatgatggaacgagccagaccgtgcttggcacgggtcggacgcaggtcatcagcagcggtcaggacaatctcgttgccttcaacggcagcggtgatgccttccggaaccacgtaggagtcagaacccttagcgcccttggcggagaagttctggccttcaatcttgacttcaacgccagcagggatggcgatggggagcttaccaatatgcgatgccatgtttcagctctcctttctcaccacacgaaggcgacaatttcgccgccaatgcctcggtcgaggcattccttctgagtcagcagtcccgaagaagtcgagatgatggcgatacccaggccaccgagcggcatcggcagggagtcggacttcgcgtaacgacgaaggcccggcttggagatgcgcttgataccctgaatggaacgctcaccgttcggaccgtacttgagggtgacctcaagagtctggccgaccttggcttccttagcggtgaagtccttgatgtagccttcacgcttcaggatctcggcgatgttcgccttgaacttggagtacggcatatccacggtttcgtgcttggccgcgctcgcattacgcagacgcgtaagcatgtctgcgatcggatctgtcattgtcatttgggcttgttgccctttctcgctatggtttccgccgccctcacgcttcttctagaagcgttcgggccgcggaccttcagcgtcgatgtttaccaactggacttcgtaacgccgggcagttcaccgcggtgagccttctcacgaaggcagatgcggcacaggccgaacttgcggtagacggagtggggacgaccgcagacctggcagcgcgtgtaagcgcggaccttgaacttcggcttgccggccgccttgttcttaagagcggtttttgccatatcagttctccttgaaggggaagccgaggtgcttcagcagcgcgtaagcttccttgtcgtccttggtggaggtcaccacagtgatgtccataccgcgcacgtgatcgatcgaatcaggatcgatctcgtggaacatggactgctcggtgagaccaaagttgtagttgccctggccatcgaactggtggccgttgatgccgcggaagtcgcggatacggggcagcgcgagggtcagcagacggtccaggaactcccacatgcggtcgccacgcagggtgacgtacgcaccgatggcctggccttcacgcagatggaactgcgcgacggacttcttggccttggtgatcttcggcttctggccggtgatcagggtgaggtccttgacggcaccttcgatgagcttggagtcgcgggcagcggcaccaacacccatggagacgacgaccttctggacacgggcaacctgcatcgggttggagtacttgaactccttctcgagctcaggaatgatctgctcgttgtacttgaccttcaagcgcggggtggccggcgcttcgacagtagtatcggtcatgccagctcctttccggacttcttggcgacgcgcacgcgcacggtcttcaccttgccgtcacgcgcctcttccttaacggtgatgccaacgcgggtcggctgcttggtctccgggtcgatgaccatcacgttggagcgatggatcggagcctcagtggagacgatgccagcctgctggccctgctgcgttgcacgcacgtgcttcttgacgatctgcacgccttcaacgatcagtcgatcgttggagagcacctgcttgacggtgccttccttgccgcggtccttgccgcggatgaccttgaccaggtcgccgctcttgatcttggctgccatgtcagatcacctccggggcgagggacacgatcttcatgaacttgtgctcgcgcagttcacgaccgaccggtccgaagatacgagtgcccttcggttcacggccggagccgagaatgacggcggcgttctcgtcgaacttgatgtaggaaccatccgcacggcgggattccttgacggtacggacgacaacggccttaaccacgtcgcccttcttgaccgacccgccaggaatggcgtccttgacggaggcgacgatcacgtcgccgatgccggcatagcgtcgcttcgatccgccgagcacgcggatggcgaggagttccttcgcacccgtgttgtcggcgacatgaagccgcgtttcctgctgaatcattgattctccttagccgagctggttctccccatttaccggggcatcgtggttgcccataatgccccggtaaatggcgagccttgccgaactttacttacttggcgcgctcgataatggattcgagacgccagcgcttggtcttgctcagaggccgagtttccataatactcacgaggtcgccaatgtgggcgtcgttgtgttcatcatgggccttgaccttgctggtggaacgaacgaccttgccgtacagcgggtgggtcgaacgctgctcgagctcgacggtaatcgtcttgtccatcttgtcggacacgacgtagccgcggcgaaccttacggaagttacgctcttcagccataatcacttctccttggattcggtagcggccggctcctggctgatgccaagctcacgctcgcgaagcacggtgtacatgcgggcgatgtcgctcttgacagccttgagacgggcggtgttctcgagctgaccggtggcgtgctggaagcgcaggttgaacagctcttccttggacttcttcaagaagccttcgatttccgcgttggtcttctcgttgagattcttgatggagtaatcagcggtaccgactgccatcagatatcaccaccttcacgtgcgataatgcggcacttcatcgggagcttgtcgatagcgcggcggagggcttccttagcgatgtcctcggacacaccaccgatttcgaacatcacgcgaccagggcgcacgttcgcaatccagaactccggggcacccttaccggaacccattcgggcaccgagcgggtgcttggtcagcggacgatccgggaagatcgtgatccacacgcggccaccacgcttgatgtagcgggtcatggcgatacgcgcggcttcgatctgacggttggtcacgtaggccggggcgagggactggatggcgaaatcaccgaagttgatctcgttgccgcccttggacatgccagaacgcacagggcggtgctgcttgcggtacttagtcctcttggggataagcattcttgctcactccttcgtttctgcagccggagcggcctcggcgggagcctcagccttgggggcttcggcggcctgcggggcggcggaacggttgccacggcgcgggcggcgatcgccaccacgacggccaggacggttgttctgctgagcctgctgctcttcgaactcggattcggtcatgtcgcccttgtagatccagaccttgacgccgatacggccgtacgtggtcttggcctcgaagaagccgtaatcgatgagggcgcggagggtctgcagcggaacgcggccctcacggtagaactcggaacggctcatttccgcaccgccgaggcggccggagagcttgatgcggatacccttggcaccggcgcgcatggcgtcctgctgggccttacgcatggcacgacggaaggtgacgcggttggtcagctgctcagcgatgccctgagcgacgagctgggcgtccagcgcggcgttcttgacttcgaagatgttgagctggacctgcttgccggtcagcttctcgagcttggcgcggacgcgctcagcctcggcgccacgacgaccgatcacgatgcccggacgggcggtgtgaatgtcgacgcgaacgcggtcgcgggtgcgctcgatgacgatgcgggacacgccagcgcgctcgaggtccttgctcatctccttgcggatctgatcatcctcaagcacgaagtcgcggtagcgttcgccggccttgttggagtcggagaaccacttggagcggtggttctcagtgatgcccagacggtagccaaacggattgatcttctgacccatctttagcgggctccttccttgttagccacgacgaccgtgatgtgggaggtgcgcttgttgatgcgagcagcgcggccctgggcacgagcgcggaagcgcttgagggtcacaccttcgtcaacgtaggtctccttgatgtacaggtcgttctcgcggaacggctcgccggccttgtcggccttcacacgagcgttggcgatggcgctctccagggtcttgcggaccggcagggccgcagcctgaggggcgaacttcaaaatggtgacggcttcggtcgccttcttgccgcggatgaggtcgaccatgcggcgagccttgcgcggcgtcacgcggacgtgacgagcgattgctttagcttccatgttctattccttatccttagcgacgggccttcttgtcgtccttcacgtgacccttgaaggtcttcgtgggggcgaactcacccagcttgtgaccaaccatggcctcggtgacgaacaccgggacatgcttgcgaccatcatgaacggcgaaggtgtgtccgatgaaatcaggggtgatcatcgaacgacgggaccacgtcttgatgacgttcttggtgcccttctcgttctgctcgtcgactttcttctgcaagtgggcgtcgacgaaggggcccttcttgatgctacgagtcatcttctcgatactcccttacttgcggttcttgccggacggacggcgacgaacaatcatcttgttcgaagccttcttcggacgacgagtacgaacctcgcccttgccccacggggagaccggcggcttaccaccgcgggtacgaccgccgtgcgggtggtcgaccgggttcatggactcaccacgggtgatcggacggcggccgatccagcgggcgcggccagccttgccgagctgaatgttggcgtggtcctcgttgccgacctcgccgacggtagcgcggcagcgcgcgtcgacgttgcggatttcgccggacggcatacgcagctgagcgtaggcgccatccttggcgacgagctgaacggcagcaccagcggaacgagcgatcttagcgccgcccagcgggcggagctcgatggcatgaaccacggtaccggtcgggatgttcttcagcggcaggttgttgcccggcttgatatcagcctgagcaccggtctcgatgacgtcgccctgcttgatgcccttcggcgcgatgatgtagcgcttctcgccatctgcgaagtgcaggagggcgatacgggcggagcggttcggatcgtactcgatctcggcaaccttggcgggcacgccgtccttgtcccaacgcttgaaatcgatgagacggtactgacgcttgtggccgccgccgcgatgacgggaggtgatacggccgtaagagttacgaccgccggtcttggacttcttgcgaaccagcgacttctcaggcgtagaacgagtcagctcggagaaatccgagacggacgcgttgcggcggcctgcggtcgtcggcttataaacgcggatagccataatgtagttcttcctttaacttttctcggctaaccttcagttaccaaagatgtcgatcgtctggccctcggcgacggtcacgatcgcacgcttctgggaagcgcgctggccgaaaccggtgcgagtgcgctgcttcttgccagcgcggttgagggtgttgacgttcgtcaccttgaccttgaagatctcttcgattgcctgcttgatctgcaccttgttcgcatccggagccaccacgaaggtgtactggccacggtcggaagcggcgtagctcttctcggagacgacgggcttaagaatcacgtcgtgagcgggcttgtgaatagcgaccatctaaatcaggcctccttcggctcggtcttggcagccacgaaagcctcgaaggcttccttggtgaagaccacgtactgcgaggtaatcacgtcgtacgtgttgagctgatcgacgaaaatcgggtgaacggtcgggatgttgcgcacggagagccactcgttgatgttgtcgcgagtgaagacgaccgtggtgaacttgtccgcggtgatcggggccagagcggcgacagcggccttggtggacggctcggtgataccgaactccaccacggcaacgcgaccggcgttggcgcgatcggacagggcgtagcgcagagctgcggccttcatcttcttgggggtgcgctgagagtagtcacgcggctgcgggccgaacacggtgccgccgtggtaccactgcggtgcacggatggagccctgacgagcacgaccggtgcccttctgcttccacggcttcttgccgccgccggaaaccatgccacgagtcttggtggcgtgggtgccctgacgagcagcagcgagctgagcggtgacaacctggtggatcagcgggatgtgagcctggacatcctcggcggaaacgccgaagagagcctcaggagcttcaacggtgccggtggcctggcccttggcgtcggtgacgttcagagtaacgtttgccatggtttatcaggctcccttcacagccgagcggacgagaacgatgccgcccttggggccaggaatggcgcccttgatggcgaggatgccgttctcgacatcagcggagacgacggtcaggttctgggtagtggcggtcacatgacccatgcggccggccatacgcttgcccttgagaatacggctcggagtggcgcatgcgcccacagaaccgggacggcgctcgttcttgtgagaaccgtgagtacggcggtaggacttgaagccccaacgcttgatggtaccggcgaagcccttacccttggtggtgccggtcacgtcgacctcagcaccctcttcgaacaggtcagcggccagttcctggccggcctcgaactgatcgacgtcgtcggtgcgcacctcgacgaggtggcgacgcggggtgacaccggccttggcaaagtggccagccagcggcttggtcaccttggtgggatcgatggcgccgtagccgagctggacagccttgtagccgtcagattcctcggtcttcacagcggtcaccacgttggtggacacgtcgacaagagtgacgggcacgaagaagccgttctcgtcccacacctgggacatgccgagcttcttgcccagcagagccttgcgattagacataatgcttcctcctcccttacagcttgatttcgatgttgacgtccgcaggcagatcgatgtgcatcagggagtccacggccttgggggtcgggtccacgatgtcgatgaggcgcttgtgagtgcgcatctcgaagtgctcgcgagaatccttgtacttgtgaggagaacggataacacagaagacgttcttctcggtcggcagcggaacggggccaacaacagttgcgcccgcgttcgtcaccgtttcgacgatcttcttcgccgattggtcgatgacctcgtggtcataggacttaagcctgatgcggattttctgtcccgccattgccgtccgccctttctagcgatgttcgttgtactgtttaccaacctgcttctagggcaccggcgcgcatggcctcccttggacatacgtcctctggcggtcatccgacatcagtgcgcggtttccggctgccacttcacttgaagtggctcccggcccgcgctcgcttttttaattccaatttgcgagcccaaatcaggcaacttgtttattcaagcattgaggcgggacagtggagttcgcgcgtgtcgcgctcatgccgttcgtattacctcgcggcatagccgctcggcgtctgttcgattgtcgcaatgcaggtctcacatctttcttattgagaaccattcgctgcgatatcatgacagatatgacttcccgccgcaagactcttaaacgcgattggttcgacaaccaacctggcgcatgggtaatggttatgctgcccgctgtggctggcttctttatcggcgggcctaatcttgatacgctttggctattggcgacgtgggccgtgtgctattgcgtgcagttcagcgccgcgcactggttcaaagcacacttttcacgccgttatctgccgccgatgctcacttatgccgtagcgctcatcgtcatcggcttgccattcctgattacgcataccggcatactgcgttggactcccttatatatagtgctggttgcgctgtcgatgctgtcctcgtggctgaggaaggagcgctcgctgtggggcaatgccgtgtcggtgattgccgcgtcggccatggccacggtgatcgcgtcgtttggcagcactgttgagacggcatgtgttatgcccatcaacgcagcacatgcctcgtgcgcagccgctgatgtcaccgccgcacgcgccgcgattcggaatatgccagatttgagccagatattcgaccttcacgcctggtggcccgcgggttcattgcccgtgagcgggctgattgccaccgtgctgtttgcgctgacgcagtatgggtcggttttggtggtcaaaaccatgatccgggaacgcgggaagcgttcgtacgtggcggcttcgtgggtatggcatgtggcgctattgctgctagccgccgtgccggctggacgcagcccgtatctgattgcgatgactgtgctgctgttggcccgcgccgttgcgttgccggtggttacacggcgcacaaccttgaagcccgtggtgaccggcattaccgaggcgtttgccagctttattgcttttggctgcatcattgcggcgatttagcgacgcttcagcgattccatggggcggtacctgctggctgagggagcgccacatatgcaaaggagcccggcccctgtaatggggtcgggctccttgtgtcgcgctatgcagacactaagctgcaacaccgcggttggtggctactgatggtgccaccaaccacaaaccgcctgcaatcaacgctcggaggcttcctcagtggcggcctcaccctcgcgctcgatgcgcagcttgtggccttccgcctgggagacaccgtagtaagcaccgacggcgatgtccttcatgtcgttgatcagcgggatgcgcgggttggccggggtgcactggtcctcgtaggcgcgcatgccgatctgatcgagcacggaccagaagtagtcctcgtccacaccgcaatcctggaagctcttgttcatgccgagcttgttgtcacggtagtcctcgacggccttcgccaggttctccacggcttcggccggggtcttgccggtgtcgatgccgaggttgcgggcgatatcctggtagcgttccggggcgatgtacttgttgtacttcggccaagaagtgggctcctcaggaatctggccgttgtagcgaatcacgtacggcagcaggatggagttggtacggccgtgggcgatgtggcacagggcaccgatggtgtgggccatgccgtggcacatgccgaggaacgcggagccgaatgccatgccggccatggtggcggcgttgtgcatcttctcctgagcgtcggtcttggccagaccaggctcgccgttgacggactcagccaggttgtcccagatgagcttggccgcgtgcagggccatgccgtcggtgaagtcgttcgcgtacacggacacgtaggcttccatcgagtgggtcagggcgtcgaagccggcgtcggaggccagcttgcgcggctgggtgcgagccagcaccgggtccacgatggccacggacggggtcagcgcgtagtcggtgatcgggtacttgtagccggtcttgtgatcggtgatcacggcgaacggggtgacctcggaaccggtgccggaggaggtcgggatgcacaccagcttggccttcttgcccagcggcgggatcttgaaggcgcgcttacggatatcgaagaacttctcgcgcacgtcggagaaggcgatttccgggtgctcgtagagcagccacataatcttggaggcatccatcggggagccgccgccaaccgcgatgatcgtgtccggctcgaactcctcgcgcatcatctcagcgcccttttcgacggtctcgacggagggctccggctcgacgtagtcgatgatgcggaaggtcacacggttggagcgggcgcgcagctggtcgatgatcttgtcgacaatgccgagctgctccatgaccttatcgcacacgatgacggccttctcgatgccgtacatgtcgcgcaggtacttgatggcgttcggctcgaagtaggtcttggccgggatcttgaaccactgcatgttgttgttcctccgagcaatgcgcttgatattaacgagattcacggcctgcacgttgccggacaccgagttgccgccgtaggagccgcagcccagggtcagcgacggggcgatggagttgtagatgtcgccgatgccgccaagggaggaaggctggttccagatgatgcggcaggcgtgcatacggacgccgtactcacgcacgagctcctggttgttggtgtggatggcggcggtgtggccggcacccagcttgagcatcttctcgcacatctcgaaggcctgctccttgttgtcggccttgagcacggcctgcaccggagcgagcttctcgtgggtcagcggctcgtcgtcggagacttccttgcactcggcggccagaatggtggcgtcggccggaatctcgaagccagcagccttggcgatgaactgaggggacttgcccggcaccgcggagttcagcacgggcttgacgccggaaccggcagtgcagccgaacatgtactgttccagcttggccttctcttcagcgttgacgaagtaggccttacggaccttgagctccttgacgagctggtcgtagacgtccttgtgggcgatgatggcctgctcggtggcgcagatcatgccgtaatcgaagtgcttggagagcaccagatcgttggcggcgcgcacgatgtcaacatcggtgtcaacgtaggccggggcgttgccggcacccacgccgagggcgggcttgccggaggagtaagcggccttgaccatgcccggaccaccggtggcgaggatcgtggccacgcccggatgcttcatcagggcgcctgtggcctcgatggacggatgctcaatccactggatacagttctcaggagcaccggcttcgatggcggcgtcgcgcacgatcttagcggcttcaacggagcacttctgcgcaccggggtggaagccgaagacgatcgggcaacgggtcttcagggcgatgagggacttgaagatggcggtggaggtcgggttggtgaccggggtgacgccggcgaccacgccgacgggctcggcgacctcatcgatgcccatcacatcgtcttcgcggatgatgcccacggtcttctggccggccagatagttggtgacgtgctcgcaggcgaagatgttcttggtggccttgtcttccacgagaccacggccggtctcgtcgacggccatcttggcgagaacgaggtgcttgttcagagcggcgatggatgccttggcgacgatacgatcaacttgcttctggtcgaggttctcgaattcgtcgagagccttcttggcgcgggcaaccagcgcgtcaacctcggcctcagctgcggcctgcttctcttctggggtcggcttggtagcttcgaccttcttctttgcttctgccacttggggtcctcctcgatcttcttggggtatatggcaaagttctgggccatcgcctcgtcacctcagttgcaccagcgggataccgcctcagtaaccgaaaatgaccggtgatgcgttgtcacattgcacatgtgacctgagccacaatataccgaacggttcggcacgatgcacacgcacaaaatcgacggcgtttcacgtgcgatattgaacagtttttgttaagagttgtgcgagatatcgaacaaattctcactttattcggcgatttggtactttttgttcactttttaccgaaaatcacatgcctgcaaacaacgcaatccgacaacttttttaaatcaagtttccaaaagtactcattttctccacatttctagaaaattggtttaaaaaagtacccaaatcgcctacaaatatacgatttttgtctcacaatctccgcgtcgaggcacatgaaagccactttcataaagtatacttgcatatatctcatcgcacaaaggggcaaatatgagggcaatgccatcaactgcagtgaaagcgcacaaccgcagtgccatgacccagtatctgtatggccatagccatgtcaccaagcaggaactggaacgcgagctcggcctcagcctgcccaccatcacccaaaatctgcgcgccctagaagatgacggactcatccgcaaaggcgaactgcaggattccaccggcgggcgcaaggcgcaaaattatgagttcaatcccgatcatcgcactgccatcggggtagtgatgcggtccaacgaactgcgcctgtgcgcgattaacctgtacggcaacgtcatcgaaaaacgcaacgatgccctgccttaccgcaacaccaacgtttactaccagcgtatcggcggcatcatcaacaacttcgccgccgacgtcgaaaagaagcacggcaaggtgctcggcgtctcgttcgccatccaaggcatcctctcccccgacgccaccaccatcaccttcggcaccattatgggcaacactgggctcacgctcgaaaccatcagccaatcggtccattacccgtgcatgatgatccacgattccgatgcctcagccatggccgaactctggttcgactccacgctcaccgatgcggtgtgcgtctatctggagcgacgcccgggcggcgcggtgatcgcggggggcaagctgtatcaaggcccgaaccagtgcaacggcgccatcgaacacatgacgctggtgccgggcggccgcgaatgctactgcggccagcgcggttgcatggacacctactgctcgccggagaccttgcccgaggattacgaaagcattcccggcttcttcagcgtgcttgagcagggcgaacggcatcatcgcgagcgcatggatgagtggctggattacgtggcgcaggccatcgtcaacgcgcgatccatcatcgcgggcgacgtgattgtcggcggtgaagcagcccagcatcttgaagacagcgacatcgaggatctgaagacgcgcgtcatcgcacgcagcccgttcggcaccgaccatttcaatctgcgcaagagctactgcgccgaagatcagaacatcatcggtgccgcgttgcggttcgccgagaattatctcgacgacatctgtggtgctgcggaacgcggcaggaaatcaagggcttccaccaaaagtgacaacacgtctacaatggaggtatgaaaaacccaccgttgcatcgttacgccactcgcccagggctgtacttcactgacgacggtggggctgacgtcgttgttcgttccgaaactgccgatcaggtttggctatgcgtactggagcccattgatgagcccagcgctttcttccaagacgccatccgcctgttcgaggacccgaatatctcctttatccagcagattcatgagttcccggtatgcacgcgcattatcgaacatttgtatctgcgcgagaccttgttccgcatgaccgggccgaactacggcctgtggtacgtgcacctgcccaaagcatgggacggcatgcgttatggctaccgcgtggacggcgcatgggacccgaaacacggcgtgcgcttcaatccatacaaattcctgcttgacccgtatggcaagggcatcgacggctccatggagctcacccccgccgccttctcctatgaatgcgatgtcgtggaccgcaaggtaatcggctcggcatacggtgccatgagcaccgtagactcgctcggccatatgccggtgtccgtggccatcgacgatcgcgatacccataagcatgagggcgacccgcagcacccgcatgtgccgtggcgcaaaaccgtcatctatgagatgcacgtcaaaggcttcaccgccaacgcaccgtggctgcccgaatcattgcgcggcacgtacgccggactcgcacaccccaccacgctcgcctatctgcagggtctaggcatcacatccatcgaactgctgccgattatggccaagcaggacgagctcttcctgcaagaacacggccgcaagaactactggggctactccaccctcagctacttcgcccccgaaccctcctacgccactaaagccgcccaggagaagggcgcggccgccgtgcgccaagaagtcatagacatggtgcgcgcactgcacgaggccggcttcgaagtcatcatggacgtggtctacaaccacacatgcgaaggcggcgtcgaaggcccgacggtctgctggcgcggcctcgacgacctggcctactatcgccatcaaaaatccaataccggtcgactcgaagacaccaccggctgcggcaatacgctggacttcaccaacacgcatgtggtcacctttgccatcgactcattacgatactgggccaagcgtatcggcatagacggtttccgcttcgaccttggcgtcacgctggcccgcctggaaggcgaattcacccatcatcacccgttcctctacgccctgcgttccgatctgctgctgggcaacctgaagctcattatggagccgtgggatctgggcaacctcggctggcgcaccggccaattctccgtgccgttcgccgaatggaatgaccgcttccgcgacacggcccgcaccttctggcttgaggatgtggacggcggctccgatttcgggcgtatcagtttgcaggagatgtccacgcgactctgcggctcggccgatctgttcgccaccgaaccagggcgtggcgctccggcctccatcaatttcgtgtcctgccacgacggtttcacgctgacggacctcaccagataccgctccaagcacaatgaagccaacggcgaaaacaataatgatggctcgtcggtgaaccattccgccaatttcggcgtcgaaggcgtcaccgatgatccagacgtcattgcggcacgcgaacaggcggccatgaacatgatcggcatgctgctgctctcgctgggtacgccgatgatgctcgccggcgacgaattccgcaacacgcaggacggcaacaacaacgcctactgccaagacaacgacatcacgtggctgaagtgggattggatgtattccaccaacaagacgcgcgaaatgcgccgcttggaaaccgtgtctcgactggtggcgctgcgtaaatcactggacctgtatcaccacgaggatttcttcacccgactgacccagatcggcctactcaagccctcaagccgcgtgcagtggttcctgcccgacggtaccacgccgatggagcgtgactggttcgatctgggcgtacgtagcttcaccatgcgattgctgtccaacagtgaggtggacgtgtgcattgtggtcaacggcaccgctgacgaccgcacattccgcctgccgccagacactcactggacgcctaaatggtgctcggccgaaatcaacggccgtcgagccgggcatggcactcaggtcgaggaatgcgatttgaacggtgacaccaccgtctggacgcagcatgtaccggacgccagcgagacagtgctcaagatggtcaaagaagtggccatgcagcgtacggaatcctcgactgagaatgaagcggataccatcaaattcgcgatgccagtaacagatcacgccgcaaacggcacctcgtccgcgcctcgggatgaggtatcagctgatatgcccgatgcccctgtggatgatacaccggacactcccgtcgacgacaatgtctggaccatgccggcgctgagcatcacgctgatgaagcaggtgtgagtcacactcaagacagcgcgacacaaacacaaaggctctccgcggaattccgcggagagcctttgtatgctcggtacaggacaagcgaaattaacgcttggagaactgcggggcgcgacgtgccttgtgcagaccagccttcttgcgctccacgacgcgagcgtcgcgggtcaggaagccagccttcttcagggcggcgcggttggcatcacgatcgatggcgttcagagcgcgggcaacgccgaggcggatggcgccggcctggccggtggtgccgccgccgtcaacgaggacgatagcgtcgaacttgccttcgagcttgagcagaacgatcggggagttgacctcacgctgcagcagcttggaggggaagtactcctccagagtgcggccgttgatggtccacttgccgtcacccggaaccagacggacacgggcgacagcctccttgcggcgaccggtgccgtagcccggctcaatcgcggaggtgccggtgccagcgccagcgttggtctcggtggtgtagttggtgagctcctcttcggtctcgacaacctgggagtcgttggtgttttcagccatgattcttatctcctctcaggtttcacttggcctgctgcgagacctgggcgatctcgaagacctggggcttctgcggggtgtgcgggtgctcggcgccacggaagatacgcaggcggtcgagctgcaccttggccagacggttcttcggcagcatgcccttgacagcgttcttgatgatgcgctcggggttcttctcgagcagctcggcgtaggagtcacgacgcagaccaccgggacggccggagtgcgagtagagctccttgcccatcttgttgccagtcagagcaatcttgtcggcattgatgatgatcacgtggttgccggaatcggcgtgcggagcgtaggtcggcttgttcttgccgcgcagcaggattgcagcctgggtggcgagacggccgagcaccacgtcggtggcgtcgatgacgtaccagtcatgagtcagatcagctggcttcggagtgaaagttttcactggattaccttttctatattgtgttccgggtctcagctgcttggtgtggcttggtcagggccgcatccaagaggcgtcgaacctcattatccgtgggctccctgaaagtcctcgatggcgagtgggatagcgctttgaaggaccccttagggaaacacaacaatccactagtatatcgccgggcttgacatagggcaactggggacactccattgggtttatggcttctcttcccctatttatggtttctctcccacccacttcggctaaccgactcacctacggtgaggcaattccctgccttctctcagctatcgcttctttcaggcctcgtctacggacagtccactggactgtccgcttaacgactcggctcgtcagagggaggtaaagcgggtcaggaattgaagatttgggcgaagcgttgggcaccgggggtgtcgaagagggtttcgagcggtaccacgttgcccttggcgtcggccagtgggatgcgccagttcgggtattcgttgttggtgcccggctggttctgcgcacgcttctcccccaccgcgtcggtgatcgaggcggcgagcagcttgcacggcgaacccttcagtgcgcggtacagcgcgtcgacgatatccgcctcgtgatcctcacgatgttcggcaaagtcggcatcaagataaccctgctcgaccagcatggccagcatcgcatcctgctcggccttggcggaggcttcgaattcctcggccgggccggtcagcaagcccagacgctcacgaatcttgacgtgctcgtattccaggtaaccggcggccggcggcaaatcgtgcgtattcacggaggccaatgcatacggacgccactgggagggggcgcggaacacgccgtcgcactgctcgaaccattcaacggcgcaaccgagaataccgtggctcgacagggaatcggccacatggtccggcaccacgccgaggtcctcacctacgaccacgccgccggcgcgagaggcctcgatggccagaacgcccagcatgatgtctgagtcgtagtacacgtaagcgccatccatagccgaacggttctcgggaatccaccacaggcggaacagaccaaggatgtgatcgatgcgcaccgcaccggcacgggcgaacatgccatgcaccatattgcggtaggcctcgtagccggtggtctccagattgatcgggctcagcggcggctggctccagttctggccttgctggttgaacatgtccggcggtgcgccgaccgtggctcccttggcgaagcgctcgggattccaccacacgtcagcgccggaggggtgcacgccgacggccatatcggacatgatgccgatatgcatgccggcgtccttggctgcctgttgggcggaggacagctgctcggcggcaatccattccagccagcggtagaagtccaaagtgtccgggtactgcttgcgcagattggcgatttccggggagttgcgattgaacttgcgctcccagttgccctcctcgccgttgggcgccccccacttgtcgtagcacaggcaccacgtggcatacgcctccaagtcggaaccacagtccgccttgaattggtcgaatacgctttggcgttcggcggtacggccggccttaaagataatccacagggcgtgcatcttgctgcgccacatggcgtcacggtcgatgagctgggaatcaccgttcagcggttcggtgtcggcatgcagtccgtcgacggcattcttgtcgccctcgctgagcgtggcatattcggcgatcgcctcaggacggatgtacgtgaagttgatcaggcgacggcttaccggcagatacggcgacggggtgagcggggacaccggctcggcggcatgcaccggattgatgagcacgaagtcggcaccggtcttctgcttggcgtccaccagcatggtcttcagatcctcgtaatcgcccacgccccaggagttggaggagcgaatcgagtacagctgggccatccagccccacagactgccgcccttcatcgggtcaagcagatcgacgcgatcaggtgcactgatcaaagtggcgtcttgcacacggtcggcgaccttgacgtgcagcgtatggtaaccaatcggcagatcggcgggaatgaccacagccgcattcgaaatgaacgtaccatccaagtcgtaggcctgggatccatctccaggaccaacttcaatggtgccttgatatggctcgccattctccagcgtgatgctcgccgaaggcacgtccagaataccggtgttcaccagcacccggtcctcgctaccggcgatatgcagcacggtgggtgccaccaatcgggcgtaacgctcgttcagaatgcgtcggatggcgatgagttgggcgctctcgctggaggcgtcgatgcccagcgctgccagcacctcgatcaggacgtcatcgtctatctcgtggtagtcatggctcatgcccaaataactcgtgccgacaccgaccaacttggccagtcgaatcaacggacgggccagacgctcttcactctcggtaatctcactcatagccccagtctaacgccgtttgattgcgccacaccgtaagaaaaatgccatgattccgccaaattatgtactttttaccctcacatagtgagatgtgagcgctcacaatggtggatagggggtgattgccggccaaatttgcgcggcaaaacacagcaaaagtgtgcttagcggcggctttccacagcgtgccgcacctcggccgaggggtcgttggccaatttggcaagcatcgcttcggacgcattggggttcagcgccacggcacggcggaccatcgaggaaagcaccgccggcgcgccttcctcggattcggtgccgagtacgcccaagaaatccaatgtctccgcatccgcagtggggtcctgcgcaccctcaagccgcatcttccagctggtgcgtttgtttttcaacgccgtatcccggaccgcaggcaccgggtccttggtcagacggccgaccagccaattcttgtcatccccgttggcggccacggcttgacgcacggacggttcggggtcttcggagagtttgaccaatacgttcgggaacggcatggtgtcggcgaggaacacgcgatcggccaccggggtgtgcgggttgccggccacagcctccaaaagtgcggtggcgcgggagaacgccgcctgatcggcacggtcaggcaacggccgacgggcgaattcggacagttcggccgggtcggtggaatggcgcagacgctcgtatgtagcggtcagcggttcgaaatccaccggagcggcggactcggctgcggactgcgtgccttggtcctgctgctgggcgtccgtgtcggttgcagtctcggccgcggcctcggttgcggcctcggtgggctgggtctgctggctggtggtgttctcgtcggtcatgatacccagcttagtcatacaggcgtcacgcgagcggaaccggaatgttgaccatgtcaatcggagccggcaccacagcggcattgaacgcttcccgcacacgctcctcgaatcgcgcgcaatcatcctgcggcaccaccgcggtcaactcgacgttcaccgcatacgattcatcctcctgactgccaccgagctgcgccagaatctgctggaatcgggccaactgcgggtattcgaggcgaacccggtatcgcttggcggtcatgatgcgggcggcgcgggcggctttcatcgccaatgacgcggcggatgagtacgcgcggaccagcccaccggagcccagcagaataccaccgaaatatctggtgacggcaaccacgcaatcggtggtgccggactgcttgagtacgtcaagaatcggcttgccggcggtaccggacggctcgccgtcatcgctcatgcgttcggacagtcgcccatccgcgcctccgcacacggcggcatacgccacgtgtcgggctttcggatgctgctcacggatcgcagccacgaacgcgagcgcctcgtcgagcgtatcgacatgggcggcgtcgccgatgaattcggactttttttcgacgagcgaatcgtgggcgggatcgtcgggcgtgttgagaatcgtctgcatgagcgtgttccggtggtcgactggctgggtgttcgattgagcgcgaggctaggcagggctatcagcgttcggagacgacgacgttatagtcttcgccggcgaagtaggcggtcaggcaggcgatcatctggcgggtgagctccttgaacgcgccgtcggcacgccagccgacgtgcggggtcaggacgatgccgggcacatggcagatggcgtcgtcggcggtcagcggctcatggtcgaacacgtcgagtgcggcgggaacatcgcccttttgcagtcgggcaagcagcgcaccggattcgatgacttcggagcgggcggtgttgatgaacagggtgccgggcttcacatgcgcaaggttctcggcggtgacgatgccgcgcgtggcgttgttcagcggcagatggacggagatgacgtcgctggtttcgatgagcttgttgagatcgtcgaccggagtggcaccggagcgttcgaaatgctcgggcggcacatgcgaattccatgcggcgacctccatgccgagggcgcgggcgatgccggccacggtggagccgatgccgcccagtccgatgatgcccatgcgacggccggcgagttgcagtccatcgccgccggtccacgcccagttgccggccttgacgtccttatcgagttggccaacgcggcggatgagctcgaacagaagggcgaaggtgtgctcggccacggcgtgatcgccataatgttcggcgttgcagacgcggatcttcagctcgcgcgccttatcgagattgaggtagctggcgacgccggtaccgcagaacacgatgcacttgacgtgcccctgctcgctgatggtgcgcagcagatcgtccgaaatgtggtagccgcccaccagcagggcgtcggcatccttcagacgctcggctatggtcgcctcgtcggacgtgaattcctcgaacatacgcacgcgggcaacgtcgtggagcgcggggaactgggccttgatgggctcgatcatcgagtcaagcacggacggcatcacgacgaggggcagatcggtgcgttcgctttgggtttcgtaaatctcggtcatgggctccacattaggaggccggcgggaaaagcgtcaccttgcggcttcccctccttgagaccaagccgagcaactattgctttgccgcctgctcctgcgtgatgttccattccttgacgacgttctggtccgcgcccatcgaatagatgacatcccagatgcgttggcgtatctgagcgtcgtaggcttcgtcccaacatgtgcctatgggatggtcgctggatatcgggcaccattggtagttgccttgatgcacgttggcggtgggcacccaatcgatgcggttgacgcgccacgaccccttgacgcccttcttgccggcgaactggatgcgtgcggtcacaccctgattgttgaccaaggtttccggcgtgttcgccgactcggtgacggcgttgcccaaaccgtagataatccacgtgccgttatagttctcgatgggctgcgcacaatggcaaccggcaccgtaaataacgtcgaaggcaccagtgtcggcaagctcatgggcttccgaaatctgccaggaatcggcgtaatcaaggtattcctgcaccgagtgcatggcgatggccaccacatcggcaccttgctcgcgggccttgttggccttgtctaccgcgcgctggatgtcgctgtcgtgattcgggtcgccgtcttcgcgcagacgatccacctgccagtcctcgtcggcggtcatgccgttgagggagaccgtgccggtgaccagacccagcttgccgccgccggtcggggaatcgatgaccaacggtttggtggagtcggcttcggttttgtacgagccggtctgggcgatgccattggcctcaagcgtgtcccacagacgggcgatgccatccgccccctgatcccaggaatggttggtggcgtgtgtgcaggcgttgtatcccacgttgcgggcggcatccgccacttccggcggaatgttgaagatcgggtacgcggcatatgggccgccgcgctgggcgatcggggtttcgaattcgcacacggcgatgtccgaagcctgaatgtactgcttcatcggcgcgaacagcgggtcgaagttgaaagcggtgccatccgtggcgttggggttcgggccttggaaatagctccacaatccctcatggaacaacaaatcgccgttgaccagcacggcgatgcagtccgtatccgggcaatccggtgaattgccgtgatgttcggtcaccggtttgggcgtgttcttcgctttattcaacgcgacgtccgacactccggcgtgtgcggggccattgccgtccgtgcgatgggttgcgaaccatgcgccgatgcccagcgcaacggcgagcgcgatcacgaacacgataatcagcgccgcacggttggttcgtgtcgaattggagcgatgttgcccctgcccagcgatatggctcatctttgcccgcccttcggaactcttcttctctctctagggtaccgcccatctcggtcaagtactgcggggagggaggcgatgagcaagcgattggacaagcaatatataaaccggttaatcttcaatcaccattcacgaacaccacgcaaaagtctcacttagtggacatttttctttcgtcgctcggacttttcccgacgtgccgcactcgttcgcccactaaaatggcggtttggaggcggacggacaatggcgtacctccgactccgcttaccacaagcggagaccgcccgtcctcggttatttcaggagttacttaacccggagtttccggaaaacaaaaaagttccgagctttcacccggaaccttaatcggcggagtcagagggattcgaaccctcgagccgtttacacgactaacaccttagcagggtgcccctatcggccactcaggcatgactccacgttacgcaataatgcgcaacagcaaattactgtaccacgtcctgcggatacggcgtgccgaacgacatattattgaccgtccgcgggcgcggcatcgccggagaacgtaacgataaccgcgcaaatcaccaacgccacaccgacgatttcaccaacgctgggaatctcgccgaacgccagtcccacggccaccgccatggcgggattgatggattgcattaccgaaaatgcgccggatgtggtgcgtcgcagcgtgatctgctccaccacatagggaatgaacgaggccatcagggaaatcacaaacagcagagccagcagcttcagcgagccgccgggctcaagcgcccacgtggcatcggccttggggtgaaccacatgagccacagccggcacgccaaggaacagggactggaccagccagccgatggtcacggcgatgcacagattatccagcgaattgccgccagccgccacgcgccggccggtgatgatatacatgccccacatcgacccgccgatcaaaatcgcaatcagaccatacaaaaacgtgccattgccggacggattggccaatgatatgccagccaacagcaccacaccgaccgccgcgataccgataccgacccgctcgcgccagcttttgccggtaatcaccgccaccgaaagcggtcccaaaaattcgatagacacggcaatgcccatatccatattgctgatggccacataaaacagggtattcatcagcaccagcgagcagccgagcagtacgaccagcccccagctgcgggcgtcgcggtgaaacagttgcgctcgcttcgccttgttccagggcctgcgccacagcagcaacagcaccgccatgaatcccacgcgataccacaccgagtacagcggatcgagctgggtgaacgcaagtttggcgacggccgtagccaaataaatcaccagtgcctcaccaatcacgataagaaccacgggaacacggttgaggataccgaccactgccttcttcatgaggtttacgctactcggagagccgggacagcgcgcattgacttggaaggcgttacggacagtgacgcaatgtggacgattccgtggaatcgcacccaccatgcgaaacagccgcacagtgcgtaaacccttggaattccggcgatattcggcattatgacaatgagcgccgcgtcatgcgcgccacatagtgagcatgacctcgttcggcattcctacaatggtggcatgagcaccgcaccgagacttgaggccgccaaacgcgattggggccacgacgagaccggatgcaccgtgctgcatatcgacatggatgccttctatgcctcattggaggtggcgcgcaaccccgggctcaaaggcaagccggtaatcatcggcaccgggccgcgcgcggtggtgtccgccgcgagctacgaagcccggaaatacggcatcaattcggcgatgccggccgcgcgcgcccatcggttgtgcccgaacggcatttttctgccagtggatatggcgtattaccgcatgatgtcgcaccgaatcatgcatgaggtgtttttgaccgtcaccgaccggttcgagcaggtttcggtggacgagggctatatggatgtgtccgccgcactgctggagtgggggcggccgagcgcgatcggcgcgtggattcgcgctcaggtggccgagcgcttccacgtgacgtgttcagtgggtatcgcctgtaacaaactggtgtccaaaatggcctcgaccaatgccaagccggacggcatgctgctgattcccgcggcccgctcggccgaattcgtgcagatgatgccattgcgtggtattccgggaatcgggccgtctttggagaagcggcttaatgcttggggcgtgcattcggtggctgaattggctcagctggatgaggctgcattgactcgtgccactggctccccggctgcggcacgtggattatgggcggcctcgcacgggttggattcccgcgaaattaccacggtacgcgaggagaaatccattgggtccgaggaaaccttggccgaggatacacgcgatatgcgcgtggtgtgtgggctactgcgttcggcctgcgacgaagtaaccagcacgctgcggcgcaaggggctggtggcgcgcacgctgacggtgaagttgcggttcgccgacctgagctatcagacccggtcttttacgatggagcggccgaccgatacggccggcgtgctgtacccggaatgcgtgcggcagctgaaagtcatgctggggctaccggcctcggcggagtctgccactcccctgcccaaaactattcgcttggccggtatgagcacgtcttcgctcagtaaggcggcggctacggccgtgcagccttcactggatgacatgctcgaagaggccgacaatgcccgcggccagacctcacaggcgcgtttgcatgatgccgaggccgcactggacgctgtgcgccgcaaatttggcaatgcggccgcgcagtttggggcgtgacggccctgcggcgtggcttcccgccagccgcgcgagctttccacgttggacatcaacaaacaccgggcaggcaccaagcaggcaccagcctcttggcatacgtttccccagaccaatttccccatcatctggaacaacgtacgccgagacgaagcaaacgcacggcacctcagacaaggacgaaaatagtctggaacaacatacgctagctcacacgcggacggccgcgccctcccaggggccaagctcacggttggcgagggagaccacggcgtgcgaggcgtcgtaggtggaaatcacgatatccggttcggtcaccccgtgctgcaccagttcggcagcctcacgtggcaggtcaacggttcgactggacatattgactacgaccaacaacttctcagcgtcgagctcacgggtaaaggcatagacgtgcggatcagcggcgtcaatcagtcgccagtcgccggcggccacgaccgggctgttgtgacgcagcgcaacgagttgcttgtagaaggagtacaccgaatccggatcatcgaattcaccggcggcgttgatctcggcatgattcggattcacggaaatccatggctcagtggcggcgtccggagcggtgaaaccggcgtagccggaaccgtcccattgcatcggagtacgcgcgttgtcacggctgcgcgcggccagaccggccatcattgactcagacgactgcaccttggcctcctcgaccctctgccggtaggcattcaaggattcaaggtcacggtactggtcgagacgcgtgaagtgggcgtcggtcatgcccagttcctcaccctgatagatgtacggggtgccgcggtgcatgtgcagcatcaggccaagtgccttggccgaacggacgcgggattcctccgcggagtcgtcgccccagcgggagaccacgcgcggctgatcatgattgccggtgaacaagctggcccatcctgcgttctgcacggcagtctggtaaccggccataatgctcttgaatttcggcaggtcaagcggcagcggcttccacttggtaccttcgcaatcaaaatcaacatgctcgaacaggaagagcatgtccaattcaccgttgcccggatcagtgatgtgctcgttacgctgagccgtgacgcctggcgcctcgcccacagtcaggaagccttcacgcccctcgaatacctcacgtcgcatttcagccaggaattcatcctgacgggggccgtccgcacagaacggattcgggttggaatagccctcctcgcccacaggaagatcctcaagctccgagccgtactcgcccggcagcttgccgttcgaatcggtgcgcttggagatcagggtgatgacgtccatgcggaagccgtcgacgcctcggtcaagccaccagttcatcatgtcgtacacagcgcggcgcacggcagggttctcccagttgaggtccggctgcttcttcgagaactgatgcaggaagtattcgccacgctcggggcagtattcccatgcggagccgccaaagtaggagccccactgattgggctcggcgccgggctcgccgggcgtggtgccgggacgagccggacgccaccaataccagtcggcgtgctcgtcgtctttgttcttggatgcttcaaaccaggcgtgttcatcggaagtgtgattgacaacaagatccatcacgatcttgagcccacgcttgtgggcctcggccagcagctcgtccatatcgtcgagcgtgccgaacagaggatcaatgtcctgatagtcggaaatgtcatagccgttgtcgtcttgcggagacttatagaccggggatagccacagcacatccacgccaagatcagctaagtaatcaagacgcgacgtgatgcccttaagatcgccgaatccatcgccgttcgtgtcttggaaagagcgcgggtaaatctgatagaccaccgcgttggaccaccacggattgggggtggcgccattggttcgaacggaatcgggaagcacgacacgctgcgcagtagtcatgattgcaacctttctaacgaatgtgacgggaatcccggagggcggcaagaaccctccaggattccacagactgatgacgggatgagacggcttacttgttcgcgcctcgcatcacgccgctgatcacccacttctgggcgaagatgtagacgatgaggatcggggccatggccatcaggtagctggcaaacgccaccggatagttggcggtgaactgcgagctgaacacgaactgcgccagcgggatcgtctgatccgcggaattggacagcagaatcaacggcaggaggaagtcgttccacgcccacagcgcggtcaggatcgcgatggtggcgttgatcgggcccatcagcgggaagatgatggtccagaagatacgccaggtggacgcgccgtcaatgcgggccgcctcttccagcgacaccggaatcgaacggatgaagccgatggcgatgaacaggttggtgcccaggccgaagatcatatacaggatgatcaggccgaacttgttgtcgaggttccacccgcccatctgcttggccagcggcagcatgatcacggagaacggcacgaacatggctgcgatgaagaagtagtacaggaagcggaagaaccgcttgtccatgttacgggccaccgcataggccacgaacgtgttggtcagcagggtgagcacgatggcgcccacggtgatgatcgccgagttcagggccgcgcgcggatagttcaccatgttcgaggcctcggcgaagttgccccactgccagctggtgggcagggcgaacgtgccggcttcggccggggttttcagtgcggtgacgatggtgaagtagagcggcaccagaatggtcaggctcagcaccgcgaccaccgcggtcagccaccagttgatcttatggtccttgcggaacttgtttttcttgggttgtgcagcaacagcgctggtcatgatcacaccttctccttgctaccgaagaacttgagctgaatgaacgcgatgatcgcgaggacgatgaagaacatcaccgcattggcggtctggtaggcgtattcgccaccggtcaggccgccctggtagatgaggtaggtgaccgtttccgtagcggagctcggaccgccaccggtcagggcgaccacctggtcgaaggtgcctaaggcgcccttcatcgtcaggacgaggttgatggtgaagaacggtccgatcagcgggaaggtgatctgccagaacttctgccaggcgttgacgccgtcaagggcggcggcctcgtagatgtcggtgtcgatggtctgcaggccggcgaggtagatcagtgtggtgtaggccacgccctgccatacggagagcaccacgatcggcacccatgccagcgattcggaggtgatcatcgattcggacagccaccctatgcccaacgccttgccgagttcggggatcggcatcatgaagatgtacttgaacacgtagccgaccacaagcacggccagggtgtaggggatgaagtagatggcgcggaacccgttgcggaacgcgatcttggagttgagcagcacggcgatgaacatggacagcaggttcaccagaatcgtcaccacgatggcgatgaagaacgtgaacaggtaggcgtgcccaatgcgctcatcctggaacatggccttgtagttggtcaggccgatccatttgtatttgccgtagcccttggaattggtgaaggagtacatcacgccgcgcaggaacggccagtacaggaacaccatgaacaggatcatggccggaacggtcatccagtagtatgcgggatcgaccttgcgatgggagaaagcggagacacgcttcttgcgtggtttttcggcaatggcggacatggtgaacctccttactgtacggtcctggcttggatctgatcccactgcgtctgcattgaattggtgaacgcctcaacgttgccggtggtcagcaggctttgcaggctgccggccatggtcatggacgaggggatgtagtggtcggcgaaatcagcgatgcgtccctccttgtagaagtggaggatgttctgcagagcctcgtcgccggcgtaggtgtccttgaacggggtgaagcagaactgcgattcggcgtattccttgagccggtcctcgtccatcaagaattccacgaacatgcgcgattccttgggatgcttggtggtggccgaaatggtgagcacggtgtcgtcgccggcggtgagcacctgctcgtccggatcgtcggtggcgggcagctgggcgaacttcacgttgatgtccgggttgaccatgcgcacctgcggcacgacgtaggtgcccaggggcaagatggccgccttgccgttggcgaagtcctgggtggcctgctggtaagtaacgcccggattgtcctgcgtgtactggtagaactcgacttccttttccgccacgggaccccacaggtcggcgaatgtggcggtgccgccgctgagcttcgagtattcgctgatcggcacaagagtgccggccagggaggcgaacggcgcctgagtggtccacggttcggcgaggctgccttcgatcggcgtgatgccggcctgctggatctgcttcatcgcggcgatgaactcggaccaagtttcgggcaggttgtccgggtccagcccagcctgacgccacaggtccacgttgacgacgtagccgttggcgttgccagcgaacgggatgccgtacgcgcggtcggcgctggtgtcgtacagtttggccagatccttgagcagcttgaccatctgcgggttgatgttgtcgaggatctcgtcgtcggtgaagtcctagaagattcccgcggcggcgaattcgccgaagtaacggccgccgtccacggtgaggacatccggcaccttgttcttgacgaagcgcgtgcgcagatcggtggcggcatcggcggtgttgatgatgtcgatggtgatgttggggtgttccgcctcgaatcccttgaccagcttcttgaactggctgactgcctctaccttgtactggaagaattcgagagtgacgtttccggcggtggatgtgccacaaccggcgagtgcggccacgcatgcggcgccggcacagacggcggcgatggcgcgggatatgctgcgggtctttgccgccatacggttcgggcgtcgatcatgcccggaggacgaccagcgctcggtccaagacgatgcggacttcatctgctgcttctcctttcatttacacttcacgacttcgctactccgcgactgtcgtgatgtatacgttagtacccatatttattgatatcaaacggcataattacaggatttctgtaaacggttacattccgtcatggtatgattgtggccattatcgagcacccatgaggaaggttcgcgcgtgatacattccacgatctacgacgtagccgtcagggccggggtgtccgtggccacggtgtcacgaacattcgccaaaccggatatcgtcaccgaggccacgcgcaagaaagtgatcgaagcggccaacgaactcgacttcgccatctcccggtccgccaccgcgctgaaatcgaagcacacgttccgtatcgctatgctcaccggcgaggcgatcgccacctggttcgactccaatctgtacaaggggctgaccgaggtgctgcagacccatggctacgacgtgtccctctacggcattgcggacaccgaacagcgcatgtcgttcttcgacgagctgcccctgcgccgcaatgtcgacgcggtgatcgtggcctcgttcaacgtaaccatggaggagatctccaacctgcagggcatgggcgtgccgctgatcggcgtcaacgtgccgcacaacgaggggttcaacgccaccgtgtccatagacaacgccaagagcatgcgcatggtcatcaatcacctgcatgccctggggcaccggcgtatcgcctacatctgcatcgacgtctcggaggcgccgatggaatacagtgcggactcgcgcctgcagggattcgaatcggcctgtgcggcgtatgaggatatcgaacagttgaccatagccctgccccacaacgacttcaccgtggacgaggcgatcgcgcgcatcaccgtcatggaccagccgcccacagccctatgctgcctgagcgactggacagcgctgcccctgctgtacaagctgcccaaagccgggatcggcgtgccgaacgacatgtccctgatcggattcgacgacagcgactatgcggccgagttcgggctgaccaccattcatcaggatccgcaggccctggggcgcaaggcagcggaaaaggcgctgtcgctgattgattccgcgacgttcggcattgacctgggcgagccgttcgagaccgcgcgcacgttcctggccatccgcaataccacggcggcgccccggcggtagtcggtgtcgtcaggcgcgggccgattgcagacgttcgcaggcggaacggatggcctcgtcggtggcggtggcggagaaacgcaggtaggcgggagcgccgtagaattcgccggggctggggatgatgccgatcttggcgagctcggccatatcggcccagcagtcgccggacttggccttgacccatacgtacagcgcgccggagggcatttgtgccgaatagccatatgccttcagtgcgtcaaccagcgcggataggcggcgacggtaacgcccccattgctcgcgcacagcggctgtgtccttcagacctgcggccatggcggcctgcactgggccagggataatctggccgatctgcttgcggtattcggccatttccttgaccagccggtaatcgccggcaattagagccgtacggtagccggccatgttggactgcttggacagcgagtagagcaccaggatgccagctgccgaaccttcacacacatgtggattcagggcacatggcgtggcggagagactgaatgcggtatcagaggcgggctcgttggattcggccaccggtgcggcaggcacagacgcagcagatgcagacgcggcaggcgcagaggacgcggctgtattgcggcgcaccgaacgccagtccattaacgcatagcattcgtcggagagcaccacggcaccgatgcgacgggcagcagccacgatgtcggtcagccagtcagcggagatgacctcgccggagggattacacggcgagttgatccagatggccttgacgttcggaatattcacccaggaatcgacgtcggtcacatcatcgactttgaccacggtggcgccggcaagttgggtaccgatttcgtaagtcgggtaggagacagccggttggacgaccacatcgccttcgccaaggtgcagcaggctggccatcagcgccacggcctccttggaacccacggtgggtacggcggcagcgttgatggatttcaaatccaccccgcgcagttcgcggaaccatgtatcgatagcggccttaaggtcggcggtgccggcggtgaccgggtatccatgggcgttgggggcgtctgcgccggcaaccagcgcctgctggacactgctcggcaccgggtccacaggcgagcctacggacaggtcgatcatgccacccggcacggttttggcggtggctttgaagccggcgatacgagaccagtcgtatggcgacgaatatgcgtggaagcccatgagaacccctttcttggacggtatgttcctaagatacgacgaaccctcggccgtgatagaccgagggttcaatccgaactatgcgctgtgtgcagcgcttatccgcaaatcagcttactggttctgcggcggcagcgcggcgacctgttccgggtctttgccgattggaccattggcggaagcgccgcccaaatcgccgacttcagcgaagaagttgacagcggcatccttgtaccaagcccactcgtccggcagatcatcctcatagaagatggcctcggtggggcacaccggttcgcatgcaccgcagtcgacgcactcgttggggttgatgtacagcgagcgggaaccctcgtaaatgcagtcgacggggcactcgtccacgcaagccttgtccttgacatccacgcaaggctgagcgattacatatggcatggaatcctccttaacaaatactgatacaagggtacgcgcctgttgggacgctcctcgctctcagccgttaacggccttatcggtttcggcggacagcgtttcggtcaggtcgcccttgccgaggcgcgcatgccagtagccgtagccgaagtagatgacgaagccgaccacgagccacaccacgaaacgaatccaggtgagcacggacaggttgagcatcaaccagaagttggccacggcgatgaggatcggaatccacgggttgccgggcatcttgaaggcgcgcggcaggtcggggcgcttcttgcgcataatcgggatggagatggccaccagcgtgaaggcggacagggtgccgatgttgaccatgtcggagagcacgccgatgtcgaagaaggcggccacgagcgccaccaccgcgccgacgacgatctgcagagcggccggggtgccatgcttgccggtcttggacaggccgcgcggcagcagaccatcgcggctcatggcgaaaacgatacgggtcaggccgagcaacagcaccataaccacggtggccaggcccagcacgatgccgaagctgatgatcttggcggcccagtcggcgcccaccagttcgaaggcggtggccagcgaggggctgtcttgcttggcgagatcggcataggagaccatgccggtggtcaccacggccacgagcatgtacatgacaatgatgagcagcatgcccacgccgatgccgagcggcacgttcttgtgcgggttcttggtctcctcagaggcggtggccaccacgtcgaatccgatgaacgcgaagaacacgagcgccgcgcccgagaggatgccgggaacgccgtacacggatggggtcatgccggtggcgaactgccacagcggctgggtcatcacgccggtgacggcggaggagccttccacggtggaggccggctggctcggcggaatgaacggggtgaagttggaggccttgacgtagaagaagccgacgatcaccacaaagaacacgatggcgatcttgagcacggtcatagcaccgtccacgcgggcgccgatcttggtgccgaatacgagcagcgtggtaaagaacgccacgatgataatcggggcgatatcgatatggaaggagccgaacgtcaggttggtgttggcgttccagcccatcaggcgcatgaaatcgttgaggtatacgccccaatacttggaaatcacggagccggccatcagcatttccagaatcagatcccagccgatgatccaggccatgatctcgccgaccgtggtgtaggtgaaggtgtaggcggagccggccaccggaatcatcgaagcgaattcggcgtagcacatcacggctgcgccgcacacgatgccggcgatcaggaagctgatgatcacggccgggccggcgtggaaggcggcggcctgcgcgcccaccgagaagatgccggcgcccacggctacggccacgcccatgattgacagatcccaccaagtcaggttgcgcttgagcttgcggccctcttcaccggtttcggcaatggtctgttcgacggattttgtacggaacagttgcatagtgctcttcttttttctctgttgtttgcgcaccgaatgcgcacaataccgacaatcgagtatagaagagcccgcgtgtcttgtctattaataagactcagagtccgcaatatatgggattaataacccactccatcaatcaatagcgcgattacagcacaccgacgcagaccggttcgggcaccaagtccactccgaacgcgctcttgactgcctgctgaaccgcacgcgccaaagctgcgatatcggccgcgctcgctcccccacgattggtcaaggccagcgtgtgctgcgtggatagactggccggcgcatccgcatcgaccttatatcccttatggcagccggcatggtcgatgagccaggcggcggacgtcttggtgccgggagtgccgtcaggcagagtcgcgtcgaacttcggcgcatcttcgggcagggccgccgcttggtcggcggtcagaatcggattcataaagaacgagccgcagctgtggcgattgtagtcgggagcaggcagaccgtcatcgccaacgggaatgccggcggcctcattgagggaggccagacgctccagatcggtcaggatattggcctcgcgcttggcggtggccatgtcgggcaaggcgtagcgagtggggtcctcgagcatacccttggcggcacgtactgcgagcacggctttgcgaatgtcggcggtggccatacggtcgcccacttcgacgccaagcgctttggcaagctgtccgtaacctaccgtgccttcggccgagtgggtcagggcaaaggtgacggagagcaccacgtaacgtggcgtcgggaagaatcggtcggccggctggccggggccggcgtacatgctggccttcagtgcggagtatcgatagccgaatcgaagatcggcgggtgtgaggtcgcgcgttgttttggtgtctcgatcccagacttccaccgattcgaccgaagtggcgacttcctgcccgtaggcaccgatgttctgcaccacggaagcgccgactgtgccgggaatgccggacagtccctcgacgccctcgagcccgagctctacggtgaaggccacgaaatcatcccaattggcaccggcctcggcattgacatgcacggtgcgatcctcgccctctaccggtgcagcctcgtccggcacagtgatgaggcgtcgggcgtctcgaaccaccacgccgtcaaaaggcttatcggaaacaagcaggttggagccgccaccgacgacgaccaagggcaggcctttggaatcggcatcctccacggcttcgatgagccccacgcgcgtggtcggctcgatgaaatgggcgatggggccgcccacgcccatggtggtgatgtctgcaaagcttgtcatggcttactatcttagtggcgcaggtgcgatatcaaggcaatcatcggctgaaacggcagaacgcccgcgtctgaacgaaggtggcgcgggatttctgccgttttggcggcccgaaacgacagaacgcccgcgaggggttcgttcagacgcgggatttctgccgtttctcacgcgatgcggatactgattccgcaccctgccactcgcctctggagcgaatacgcaaaaacccggccgaatgggccgggttttgtaaagctgtgatgcttgcgatcaacgagtctcgcggtgcacggtctgcttgccgcagcgcgggcagaacttcttgagctcaagacggtcgggcgtgttacgacggttcttagtcgtaatgtagttacgctccttgcactcggtgcaggccagcgtgatgcccggacggatgtcggcgctcttagccattgtcattcacctctgtgttcttaggtatagtgcgcgcccaccggttagcgggcgcgatttgtagcgaggaagaggctcgaactcttgaccttacgattatgagtcgtacgctctagccagctgagctaccccgccagagagccccgagtgagaattggactcacgacctcttccttaccaaggaagtgctctaccactgagctatcggggcgtggcggatagtggattcgaaccactgaagcacgaagcggctgatttacagtcagctccctttgaccgcttgggaaatccgccagtctgtttcccgccgcggtgtttgacctcaacaggcaacttggctatataaccacagattttccaggtatgcaaatcggcccctacgcgaaccttgttttaccgcggaattctgcggttttatcggcgtgtctcacagcgtgttttcagggcccgcttcggccctgcaaacagccccgaccaaggctgcaccccgcacttcacccaatcattttttcttatatggtgctctagaaccttgcaatggcgcggttttcgagcgatgtcgcctgtttgcgcggcacggcgcatgctggcatgctgggcgcatggcttctgatcttgtacatcacggacaatcattcgacgaccagccgctcggattcggcacgctggccattcacctcggtaacggggtcgacgccgaaaccggcgcgatccgtcgccccatcacgctggcgaacgcctacgcgctgccctacgacccctcggccttggcgattgccaagcatctcgaatcgctggatgtggtgcgtttcgtggcgtaccccggtctggaatcgcacccgcaccacgaggtggcggtcagccagctggcccgcccggactccgggttcggcggcgtgctgtcgttcggcctcgacaccgatcatgacgggcacaaccggttcgtttccaagctcaatgtgattacgtcggccgtctcgctcggccatgacgaatcgctgatcgtgttcctcggcgaggatgacgagcgccagtacctgtacccgcctgagttccaccgcggcttcttccgtctggccgtgggtctggaggatacggacgatttgattcgcgacatcgatcacgcgctggtggaggccggattcgaggtgtgagaccgcaccgcgcgcatgatttcggcctcttccgccctgctgccgccgtcagtgagtcacaagatggctcggtgacgacgatggcagggctttttacgtcggcacggggacaatacctggcggtctgccgacgatgacggcacttatcgtcggcagaccgccaggtattggaccgtcgccgacacaaaacgccgatttgccgtcggcaatggtccaaaaactggccctataacgacgccaacgcggctcagcatcggcacatcgccatttcgtggcccactgccgacgctggcctcatgccacggcactcagcgtcggtagagagacaaccattggcacagcgcgacgacgctacgaacctgcgacacggaaaaaacaacataccgtcgatctactgccgtcttgtgcaaaatgtcttaagccgctcggccaagtcgccgactgagcctcttccatagggaccccaatccgttacccagtgcagatgcggtgcaacgccgaactcaactacgttgcgcgcatgcacctttatgcatagcaggcatggctgggcgtttggcggaagcggttttcggctcccctctctgagggggagcccctttccgcctggcaagagaaaaccccgactgtccgtgggaacagtcggggttgttgaagttcgctaggcgactaatcagccgaggatggcgagaatgtcgcgggcgccgacgatgaggtagtcctcaccctcgtagtggacttcggtgccgccgtacttggagtacagcaccttgtcaccgaccttgacatccatcgggatgcgctcgcccttgtcgtcacgacggcccgggccaacggccaggacttcaccctgctgaggcttctccttggcattgtccggaatgtacagaccggaagcggtctgggtctgggcctcggcctgcttgacgatgatcttgtcttccaacggtgtgagcttaatcgacactgtgggtcacctcgtatctacttgtagttcgataatgccgcgccagaacgcctcaagaggctgacgatcacttgcgttgtccctttgcgctaggacacatcgtagcgcgattattagcactctgccaactcgagtgctaacgctgtgagagaaaatcgtcgaatcgcaacgctcagttgccgcggcgggcaagaatggagtccaggcctgcgcccaacgaatcggtggtcgccgctggcgcttcgacgtcggcacgctcctcggattcgtggaatgcggctcgctgggcggcgtttgcagcctcgtcatcggcgtccgtatcggcatcatcgcgctgctccggctcagtgtctacagcgtttccggcgctgacagccttgcctgcatcgacggccttggcgtcgtccgcggccttgacggctcgggcctcgtcaatcaacttttccgccactgcgggttcgacaggttccgccttggacacctgacgggtcgacttgatctccaagctttccggagcgttgtcggcgttatgttccccacccaaagtgaaggagatgagatcctgcgaggtggacatatcgaagacgtccagtgctcgggcagggcgtacgctgaccagttccgacgtggcatcggcagcggcagcggcatcgtcgcgctcatcgcgctcgtcacgcaccgtaagcgatggttcaactcgaggggcgacggacttgtccgactcaatcgacttgtctgtgcgaacggaggcatcaggtgtggcggaagattcgctggtttcggcagcggacttacggtcggcggattcatcgaccatagcagacggctcggcggcaggcttatcggcggcggactgtgcaatatcagacttctcagactgtttggcgtgctcttccgcggcctgatatgcggcggcggactgacgcaacgccttggccttggcctgctcaatctcggcatcgcgtaacgcgcggcgaatctgccgctgttccatgacctcggtggcagcatcctcaatctgctcggcaggcttctcggcaggcgcagttacggccgcaaccggttcggccttgttcacacgcttgctgtccttggactcggcagacggtttcttggaccagcccgtaccgctatgagcccgctcgtagcggaccaccttgcgctcccattgccgggcctggcgtgaggcattggctcccagcaccagcaccagcagcaacagcacgaacggaataagagcaagcagcggactgaaatgcagggggaacgatacggcaaacaccaacacggttatggcaagcaggcatacggcgagaatctgccggcggcggatggccgcgcggcgcagttcccgcacatgggcgatgtgctcagatgtcagcctcgctgacggtgttgatgctggcattgctgcccctttcgccttatgcggcttgatgtctccgaatcgtctgccgttctctgcatcaacgatatgcagggaaggcgaataacgatcctgccggtgctcgtccacacgtttcatgccgttggccgtacgtacgggcagccatacaacgataataatcgccacaatcaccagcacgacgacagtgctcagtgactcataacccatagagtcaaggataggagacgtgccgacgaactggggctttccgtccgggcgtgtcggagcggaattcttccggtcgacgcttatctggaaccggcggcggcgagtctggcggcgaacccttgccccatatcttcagccaacagcgcaaacgttacgtggtcgcgccactggccattgacatacatataccgctcgcgcagtccctcatgatgggctccgaccttacgcaccacagccaaagaacgcgcattatccggcagaatggcgatttccagccgatgcaacgcgggcccgaatgggtctccgagcgcccaatcggcaagcatggccagtgccattggcgcgaatccgcggccggcgcaccgttgatcgacccaataaccaaccacgccggtacgcatggcaccatacacgatggctcccaacgaaatctggccgacgatacgcatctggtattcgatggcgaagatcacgccgacgccatgctgctcgttacggcgctgccgctgcacccattgattgaatgtgatggagccgccatgcatcgggtcaccggattcccaaggtgccagccagtcgttgttgcgccagcgcacttcgttccagccgtcctcatcatccatggtcagggggcgcaggactatcggaaaaccgggatgggtgagacgtggcgggcggatctggtggtccagcttgaacgcctctttaatcgactggaaaactgacacggcctttattgtagccatatgaaggtcttgcgccgctaccgtggccactttcgttttacgatggaaacactagattgtgcggtatgagcgaagtgggcagtggcatgaatatcggcagcgactacagcggcacagagaaaacagagaagacggataaagcgacgctgcgccaccatatactgtctcggcgcaagcgcgttccagcggaagaacgcggagcggccggtgaattgctggtgcgacggttcccagcacacatgattcaggatggtcccacagtggcggcatatgtgtcgatgggttcggaaatcgaaacccggccactgttgcgatggctgcgggctcatggctgccacgtgttggtgccaaggttggggtctgggttggaaattggctggagtgtgctggattcattggaatcattgcgctcgatggatgcagtgggtggcgcgaacaatgccggtagctgcagctctcccagcaccgtccatcacagacccgatgagccaactggcgcagttctaccgcccgaagcgttggagaaggccgatctggtcatcgctccggctttggcagtggacccgcagggcaatcgtctggggcgtggagccggctggtatgaccgggccttggctcgccgcaagcccgcatgtcccctgattgcggtgtgctggccgtgggaggtgttggacaccgatttgccggccgaaccacatgatgtgccggccgacggagtgctgacgccggagggacaccggcggcttagctcatcgggccggttgagctggccggccggccaagatactcggcgcaagccagactgaccaaccagccacgcacactggccgatggaaccagagtggcaacagcaagctggctagtaagaccgtaacgccaatgtgtcagggcggcgactaggatatgaacggttgcgtggcatggcgtttgggccatccgcgagaaatatgactttgttggaggaatccgttgcctacctatcattaccgttgcaagaactgcggctatgacttcaccgaacagcagtcgttcaatgacgacccgattaccgtgtgccccaagtgctcacaggagcaggtgcgcaaggtgtattccgccgtgccgattgagttcaagggtcacggcttctaccgcaccgacaaatccggcaagtaaggtctgtacacccgcttttcctctgtaaacgacggtgtcgacggcggtatgccgcggatattggcactacgggcactgtctgttgcacaggtttaaagcgttgtggataacttggcaagctagaaccacataggtcgatttggcttgcgcttacgaaaaacttcaggtcaccatggttgcatggtgaccttttcgtttattaagccgcctgcgcgcggctcattgcggcgacggcgcatggcggatgccttgcgccgactcactgctgcgttgtgcgtgggactcgcagtgctgtttgggcttgaagccgtattggccgtggtggagaccgagccgatggtggtggccgcccgctcgattcgacggggtgacattattctggccgccgacgttcagttggctgatatgccggtatctgcggcaggcccgtcttggacaggcaatattgaggatgtggtgggcaaggtagcgcaaatcgatatcgaagcagccgatcccatttccacgcatatggccagagatgcgcccgtagcaccgaccggcactacggtgattgaagtccgcttggccagtagcgtcgacgatgtattggccggcgatcaggtgagactggtttccgccgtcggttgcgaaggcgctgattgcacgctggccgagaacgccacggtgatgaatgtcggcaaaccggatgcgattggtgcattgggaggcaacgaccgactggtgtcgttcgcaatgccgccggaggccgcggccaaggttatggagctgcaacaggccggagcgattatggccgttgtgcggtaggaagcggaatcggccttcggccgatactgtgttttccgcagccgacaggctgcggaaaacacagtgttggggcgcacagagtgcgccccaactcctactcgcgctcgttaaaaacggcccaatgcggcggcagttcgccgaggatgcgtttgtcgtcgtcggattgccgttgttggtcggtctgcatgtctccgggctcgagtttgacaccgtcagcgtcaaactgctcagtgcccttcatcaccacgcgcttgtgcttgcgcggtgtgcgccgtgtagccgagtattccgccatggttattcaacctcgcgatagatctcaccgatacggctgacgatacggtcgacttccttatcggggttcacgaaggcggcgacactccagacggtcatcacattccagcccaaggaaatgagatcctgtgccgacaaacgatgacgcctacgcgtggattgcacggacataaagttcgcgtcatcggtctgcacggccaaggcaaacggcttgtccttcaatcccaccacgagcggaatcttcacgcccttgtcgaatccataatcaacagcagcgttcagtcctcgcgcgcgcaacctgtcggcgatatcgtcgaacagcacgttgccgcctgccgcatcacgcaacggaagcaccggacggtcgtcaagctgttcggcccacgtcaacatggtcttcaggaaccgaggaccggactggtgcagtcgttcttcatccaaatcttcggaaccaaaggccgacacaatatccaagctgtggtccgccaatgccagggcatccagcaacagtccgcgaccgcctgtgctttcgagcgggccgaactgctgaagcagacgtccgtgcgtggttttcgcatagcacatcgacagaatcacgtcagtggcacgacctccggccacgtcacgcaaggaaaccaaccgcacatggcgcaggaatcggcccatcgccttggatttgcctgccaacgacttcaattcggcacccaagcgtgtgcggaatgcgtcggtcaacatcacgaccacaagtcgatagctggaaggaaccacggcaaaaccggcggcacgttgcgtaatcagacgcaccacttcatcaatctccggctggctggattccaccagaccagaagacataaccggcacaccgctcgcttccacacggtggaatcgcacctcaccggcagccggctcggtggccacatcatagcgaacaggaccatatccctcggattcaaggaatgcggacaggcgcggcgcacggcgagatggggcagcatccacctcgatatgaggcaacgtgtcgatcagctgcttgacgctttcgctggttaccgtcgcgcagtgggcgatcaccaccacctgctgcacgcggccgatgatggacagcaactcgatagcgggaatgtgcgcgcacgcatcgagaatcgccacatcagccagcacacccggctcggtgagtgcggcgagcgtacccggcgcggccaccagaatcggcttggccgcagccagaatctccggatgatcacggcgaatcctgctcagcgacacactggcgcgccctgccagcacggtgtgcatctggttggcttcctgagtgcgggagaacagcatgtcgcacaggcggcgcatggattcctgcgacaccatcggtccgatggagcgcacgtgctccacatcgacctgcgcaaagcggtcggatgcggcctgcagcgcggcaccatcctggttggagatgatggcggacgaacgcacaatgtcctcaaacacggtggtccaccaggccagctgcacttcgccgcgcacctgctccacgctcactcggcgagcgttgagatcggcgaccagttcgttcagtccggcagaggcgaattcctgctccagcaggcaacgctccggcaaggtgtccagtgccttgcgatcatccagcagtgctttcaggcgtgcttccaccttctcgaaatcggcggtttccagattgccaccagcgggtgtggtggaaagcacggtatccagcgcggtcatattgctgaccagcgcctcttgggtggagatgatctcgtcgagcttgctgggcagcaccggccaaccgccgtgaggcacgaactgatgccactgctccccttgcttggcgactaccttcaacgcttcgtgcaagtcctcgacctgcgcgccgacgcgcagcagatccttggcttccttgatgtggcggcggcgctcccagaatcccatcgacgtgccctcggccttgcgctggctcttcggcttggtggcctcgatcatggagctgatgtctcgctcgaaaatctccggctggaacacgtcaagcactcgtcgcagattcttcaaaaccgtaacctgacgctcccactcgcgggtggtgggaggaaccgggaatccgcaggtctgcacggtgcgtgccacctgctcacgggtggcgggcaggaagcgacgcagcaaatcgtccacgcgctggtaggcggttactgcctgttcttcagtggtgatggacgccttgtaccatgcggtgtcttccgggccgatggtgtattcgccgagctcgccagcgcgttccatcttgccgatccatgtgtcaatatcgttggcgatgctcagggcacttgactcgtcaagtcgaacgtgggtggcagggtgcgtcgggagcacggagatacgggccagattctgaatggtctcgtatgcggacacattccacttatcattgcccccgtgcaggtcgcccaagtagcgggtcaagcgcgaacgcacgcccacgagttcgtcggccaactggtcgaatcgctgggtggcgactcccggttggaatccgactgcggcaatcagctgcttatcaagcgcggcgttggcgtgttcatcggatacatccagtacctgcgccttcatctcattggcggaggccgtctggatgaacagacgcttctgctcggccacgccgggcacgtacagcacggaacgaccattcatcaggcagcgcgatgcgatggccacagactgctccgcggtgcccttcgggaaggtgccgtcgaccacgatgctatggccattggcagcaagtgacgcggcatatcgcaccgtattgtccacatcgccgacttcgtactcggcatgcgggtctacgtcgaaaggactgtattgcggaatattggcatctttgagcgcggtgcgggcggattcgtcgccggcaagcgcgtccaacagcacattgccggtggggccgttctccagctggtcgatgaactgtcggctttcgctgatcatctgcgacgaggggtccatgaagcatccgagcacaatctggcgctcgatggcgaagtcggagatacgctccgacgcttcggacgaaatacgggcgaacatcgcggaagtttcgggagtgccactgtcatagctggcaccgtcaaacagggaatcctcatccaggaacaccccctgctcacgcaatgtattgacgaacgcgacgttcagggccacgcgaccggtgaatcgaatggtggtcgacaagccatcatcctcgatcgtgacgctcaccgggtacaacagcaccggcagcgcgttgcccttccatgtggccacgccgaccacgagcgacaactccgccacgccggaaatcctgcgtttggcggcctggtcatccagcacgcgcccaatatggcgttcggcggccttaagcacacccgtgtcgcggaacaacgaatccaaccggacatggccggaagcgaacagctgggcgatgccggagggatgggcatgagtcatctccagcttcgcggccagttgattcacatcctcgagcggcgatggcggctgcatgctgcggtattggtcacgccagcgacggatgcgattcagaccttccgtgagattctggttctgagtctggctctgggtcatctctcgactcactttccaaccgcttcgcggtattcctgatagcccttgttgtgagacagggcttcgtcaatatcggcctcgccacgggcggcgagccaagaatacatgtcgtcgtacaggtacggattcatggcgaggaacgccagcaattcgggatgacgggcgacttcgaattgaacattgaaatcttgcgtggtttttgcctcgtcagaggtcaggccatcgacttcgactgccggctcctgtgctttcagctcgcccttggccacacgctcgaacaccgagccgggctcgaagaccggagtgtgtacgcccgtggagtcgatatcatatgcttcggataccgactgctgggcggtttcggcagccggctgctggtctgctacgcctgctgcggtggcttcttgatatgcttcggctgcggtccgctgctgatcgtccggtacgtcagctgccggctggtcggtttcagactgggcggttgccggctgagcggtctcaggctgggtgttttcagattgagcggcttcggcttcccgggcggcttcaggctgggcaacttcagcatgctgttcgacagtgtccgccggctgagaatcgccggcattcctggtattcggagcggactgaacgttttcggctgacttgcttgcgccagccaccacatcggattcaacaaccgccgccgacgccactgccggctcgcttgtgctgggagcgtgcttaacaacggcatgggcgatggcatctactggaacaataccggagatcctgctgtgcttggatgcaggcgttacaatcgtcgactcaggttcggtctgctgcttcggcagtgccacggagttcatggcctgctggtttttgcgttcggtctcctgctcggcatgctgggccaacgcatccgcgaacagatcacggggtatggccggctcatcgtttttcgtcactggctgcgtgatattcagcgagccaagttcaagctcgtcgaccttgcgtcgaacattatccgcgctgaagatggcggtcggctcgccggcccgcaaatcaagaatatcgtcgacggacatatccgccgcatccggctcctgcggtgcttcgtgaaccgcatagccaaacaaatcaggcaccttgaggtcgagcggctttgccactggatcgtcgacacgaatgaagtccgcaggcacatcgccgaactgcatgcgcatgggagacgtcggcaacaggaactcggcattggccggcaagcgcaacaaatcgccattttcccgcaccacatacgatccattggtcgatccaagatcacggaccgaggccgtgccattgctttttaccgtgaacatggcgtgccgtttggacatcgatttggtttgatcggcgacgtcaaggcgggtgttgccatcatcggcaagggggcgtaacggcttacggccgatttccacgcactcccccggcttgacgctgatccggtcgacaccgttgatcttcaccgtccactcgctcaccgtgaccgccttcctggacacactatttgaccacactacgtgccattgtgtcatcttttaccggcttttggcggattactgggcacagaattgacaactttcgctcattgccagctttgtgtttccacgccggatcgcgttctccgcctcgtcctcgtcaactagtctactcagtatgcggaaaccccgcagcctgaaacacaggtgcggggttcctcgaaaagctgtgattgcggcttatgccgcacaaatcacttgagctcgacgctggcgccagcctcttccagctgagccttggccttctcggcatcttccttcttggccttctcgaggacggccttcggagcgccgtcgacaagagccttggcctcggccaggccgaggttggtgatggcgcggacagccttgatgacctggatcttcttgtcgccgacggcggagaggatgacgtcgaactcatccttctcttcctcagccggagcagcagcgccagcaacagcggcaacagcggcaaccggagcggcagcctcgacgtcgaacttctcctcgaaggccttcacgaactcggagagctcgaccagggtcatctcgccgaaggcttccagcagctcatcgttggtgtacttagccattatggcttcctttcaatcttggcggcggacgaagtggtagatccgctgcctaataaaccttattgtttaaattatcgaagcgactgattcatgccgtgagggcgtaaatcaggcagccttctcctgcttttcgcgcagggcgtcgatcgtgcgcacagccttggtaggcagagcgttgaacaggtacgcggccttggccatcgatgccttgatgtcgccggcgaattcggcaagcagctgcgggcgggacttgaggtctgccagcttcttggcgccctcggcatcgtagacagtgccgtcagcggcggcacccttgatgacaagagccttgttgtccttggcgaagtcacggatgaccttcgcagcctcgatgaagtcgcccttcacgaaggtgatggcggtcgggccggagagaatctcgtcgagaccctcaatgcccgcttccttggcggcgatgcgtgccagcgtgttctttgccacggtgtaggaagtatcgcggcctagcttttcacgcagatcggaaatctgcggaacggtaagcccgcggtactcggtcaggtagacggcgtcagcgttacggaattcttccgtaagctgagcgactaccgcttccttttcgggcctcttcatggcgttccttcctaagtcggccgttgacttggagttcggaactttcggccgggcaacaaaaaagccctgcgcacaggcagagcaatataatctcgcgaagcgaccttcgccggcccttgacgggcttatatctctcaacctgcgctggcttggcgaaccaaacttcggaaatgcactcgcgcgcacttcaaccaacggtctgcggtttacggatgattagattacggatggtcagcgacattgcagaattcgggcgtgtcgcggggcattacagcgtggcggcgtactgggctacggacgcggtgacttccttcagatagtcgagcgagcgacgccagtggccgggcacctcgatcgaatggttggcatccgggtattcgtgcacgtgcggggtgagcgcgttggcgcgggcttgatcgtagaacgggtcggcggtgccggcgcagatcagcggtgccgggccggagtatcgggagctggcggcgtgcgactggccggcctgttccgcgcggatgatcgcccttgcttcggccacgctcggggcctcggattcggcgacgatatcatcgccgacagccggcaccggaatcacccgggcggatggatcgaagtcggcgtgatgcagcaccggggtcagcagcacgaacggcagaccgtagtgtgaggccacatgtgggtaggtcatcgtcgtcagcgacttgccgatcagcaacaggcgagggccggacggggtgtcggaatcacggttcggcgagccagctgcgccatcggccagcacggtagcagaatcatcggcggcaacgccatccccggaatcaccggctttacccgcgccggactcgcgcgcggcggccacccagccgtcaatcgcctgattgaggaccggaatcaccgtggacaggtcgtcggaagcgttgcgtacgttcatgcggtcgattcgccagccggcctcgaccagagcctgggccgaccagtagagcagcggacggtcgcagttgtagccggtgccgggcatcagcagtacgcggccgtactcctgaccgggcttgacgacattcttcttccaagaggtgatgctgacttcgacggccggtttcatcgcgcgccttccttccacgggtgtgtcctgcgtgtcccctgagttgttccgaattattctggcagtcagtctactcccggacccgttcacgttgcctccacaagctataatcggccacggttctgattgggtgcgcagcgcctgacgcgcgttgggcaggccgatcagggcgagtcgcaattctcgccggggccagccgcagcattatgcacgcggtgcgcagccccgcataaacccaaggaagtagagagtaaatggagaagttcttccatttgaaggaaaacggcacgaccgtctcgactgagattctggccggcctgaccacgttcttcgcgatggcttacatcatcgtcgtcaacccgcagatcctgtcgcagacgggtatgccgtggggcggcgtgttcctggccaccatcatcgcggccatcatcggcaccctggtcatgggcctgttcgccaacgtgccgtacgcccaagccgccggcatgggcctcaacgcgttcttcacctacaccgtgtgcttcggcctcggcttcagctggcagcagaccatgtgcatggtgttcctgtgcggcctgatcaacatcctcatcaccgtcaccaagatccgcaagatgatcatcctggccatcccggagtccctgcaacacgccatcggcggcggcatcggcctgttcgtggcctacgtgggcatgctgaacgtcggcctgatcaagttcactcccggcgatccgaaggccgccgccaagggcggtgccgttgcggctaccccgggtctggccgacttcaacgataaggtgctgtgggtcttcctgatcggcctcgtactggccattgtgttcaccgtgatgaaggttaagggcggcatgctgctggccatcgccatcaccaccgtaatcggcatcccgttcggcgtgaccacctggtccaactcgcagtccatcagcgagaccttctcccagctgccgcagaccttcggcgcgatcttctccgccgagggcttcccggcactgttctctgatccgaccaagctgccgctggtcatcgtgaccatcttcgccttctccatgtccgatacgttcgacaccctgggcactttcatcggcaccggccgccgcaccggcatcttctccgccgaggatgagaaggctctggagaacggccacggcttctcctccaagatggacaaggccctgttcgccgactccatcgccacctccatcggcgccatctgcggcacctcgaacaccaccacctacgtcgagtcttccgccggcatcgccgcaggcggccgaaccggcctgacctccgtggttgtggcgatctgcttcgccttgtccgcgttcctggccccggtcgtctccgccgtgccgtccgccgcaaccgccggcgtgctggtgatcgtcggctgcatgatggccgcttccctgaaggaagtcaagtgggacgacatcgccgaagccattccggcgttcttcgccgccgtgttcatggccttctcctactccatctcctacggcatcgccggaggcttcatcatgtactgcatcgtgaagacctgcaagggcaaggccaaggaggttcacccgatcatctggactgtggccgcgctgttcattctggacttcgtgtgcatggcgattctgtaacgctgattgacaacggattagcctttaaggattaatccgccgccatacggcataaaggccgggctctcacaagggcccggcctttgttgttgccacagtgatcaacgcccatgagtaccttcgatgatcatccgccattcttgatgcatgggaatagttgtcaaccgacaactaaacgtacatggcggcagcacgagtgccttattcaacatcgaaatatgcagcgcgaagaagccgaaaaaccaaaaaggcttctataccgaatgaaacggtatagaagccttttggtttgcgatcaagcccttctcacccgagagaagctagagaacgatcagtcctcgaatgccgaaccgtcaagcgggaagccctacgggcttcccgtaggtgaggggagcggctatgccgcgaccgatccgtgagagggatttagtcctcgaacggatcaaagtcgcgacggacgcggcgacgcgggcgctcagtacgctcttcgcggtcggcgcggtagtcgtcgtagttgtcgtcggtggcgtagcgcgggttacggtccgagccacggccacggccacgggaaccgccacggcggtcatcacgatcgccacggtcatcgcgatcggaagagcgacggcgacgcggacgatcatcgtcacgggagtcgcgagcatcacggtcatcgcgatcgtcgaagtcacggtcggcagagcgacggcgacgcggacgatcatcatcgcgatcatcgcgatcgaagtcacggtcatcggagcgacggcgacgcggacggtcgtcgtaatcatcctcgaagtcatcggagcgacggcgacgcggacggtcgtcacgatcgtcgaagtcacggtcatcgcgatcggagcgacggccacggccgccacggcgatcgtcacggtcaccacggccacggccgccacggcggtcatcgcgatcgccacggctcgggcgggcgttgttctcctgatcctcgaaaccaggaatggccagggagatcttgccgcgatcatcgacaccctgaacgatcacctcaacggtgtcgccttccttgagcacgtcttcgacagcgtcaatacgctcgccgttggccaggttgcggatctgggagatgtgcagcaggccgtcggtgccgggggtgaggttcacgaaagcgccgaacgacgtggtcttgacgaccttgccgttgtaggtttcgccggcctcgggcacgtgcgggttggcaatctggtcgatgatggccttggccttctcagcagcctcgccaccctcggaggagatgaagacggtaccgtcatcctcgatggcaatttcagcgccggtatcttcctgaatctggttgatcatcttgcccttcgggccgatgacctcgccgatcttctcgaccggaacggtggtggtgatgatgcgcggagcgaactcgctcatctcagccgggccgtcgatgcactcgttaatgacctcgagaatcgtggcgcgggcttccttggcctgctgcaaagcggcggccaagatgtcggcggggatgccgtcgagcttggtgtcgagctgcagggcagtgatgaactcggaagtaccggccaccttgaagtccatgtcgccgaaggcatcctcggcacccaggatatcggtgagggtcttgaagatgtgcttgccatcaacgtcgccggacacgaggcccatggcgatgccggcaaccggggccttcagcggcacgccggcagccaaaaggctcagcgtggaggcgcacacggaacccatcgaagtggaaccgttggaaccgatggcctcggagacctggcggatggcgtaggggaactcttcacggctcggcagcaccggcacgagagccttctcggcgagggcgccgtggccgatctcacgacgcttcggggagccgacgcggccggtctcgccagtggagtacggcggcatctcgtagttgtgcatgtagcgcttggactgcggaccggacagcgcgtcgatctgctgctccatcttgagcatgttcagggtggtgacgcccagaatctgggtctcgccacgctggaacagggcggagccgtgcacgcgaggcacaatgtccacctcggcggacagggtgcggatgtcgcgcaggccacggccgtcgatgcggtagtcctcggtcaggatgcggcggcgcacgatctggcgctgcagctccttgaaggcgttgcccagctccttgtccttctcggcgtcgtccatatcggtgaactcgttcgcgagcacctcgcgcacgtgctccttgatctcatggatgcgatcctgacgcggcagcttctcggcgatggagagggcctcgtccagatccttgtgagcgatctcgtcgatacgggcatacagctcgtcggtgtactccgggaagagctggaattccttggtctccttggcggcgatcttcttgagctcgtcctgagcctcgcaaatcaccttgatgaacggcttggcggcctcaagaccaccggcaacgacttcctcatcgggcttggtctgaccctcgtcatagatgaggtgccaggcgttcttgccggcacccgcctcgatcatggcgatggcaacatcaccgttctcgatcacgcggccagcgaccacaatctcgaacacggcgcgctcacgctcactccaacgcgggaaggcgacccactggccgtcgatcagcgccagacgcacaccggagaccgggccttcgaacggcaggccggagatcatagtggaggcggaagcggcgttcagggcgatgacatcgtaagcgtcatcagggttcacggcgagcacggtctcgacgacctgcacttcgttgcgcagggtgtgcgggaacagcgggcgcagcgggcggtcgatgatgcggcaggcgaggatggcctcggagctcgggcggccttcacggcggaagaacgagcccggaatcttgccggcagcgtacatcttctcttcaacatcaacggtcagcgggaagaagtcgtagttctccttcgggctggaaccggcggtggtggtggacagaatcatggaatcgtcgtcgaggtaggcggccacagcgccatcggcctgctgggcgaggcggccggtctcgaagcgcagcgtgcgcttgccaaacgatccattgtcgattacggcctcaacggccttgatttcgggaccctccatagggttcctccttctttaattttctaattattcctacatactgtgctgcggttcggcgactcgcttgaaccgcaactgtcctcttcagcggacgtcacataccttgtttcgactgaccccttggccgtcgttcctcgtgtcaaccccttcattcgggttctcctgtcggccttacctgctggcctatcctctaaccctcttgccgttgttgccgttggctggcgatatgtaaaacgcccgagcaccatcctaggtactcgggcggaagtcttcaattatcgacgcagacccagacgctcgatgagggaacggtaacggttgatgtcaacgcgcttgaggtagtcaagcaggcgacgacggtcaccgatcatcagctgcataccacgacgggagtggtggtcgtgcttgtgctccttgaggtgctcggtcagatcagcgatacgcttgctcagcagagcaacctggacctccggagagccggtgtcaccttcatgggtcgcgtacttagcgatgatttcctgcttttcttcagccgtcagtgccacggcatcctccttatattgctgcgcggtgctaccggcccgatgccggcgcgctctctatccgcgggcgaaatacgccaagggtcaattatacaggagcaccagacaccacgaatcagaccaacgtcagcaggccgccaaacatcacaacaagcaaagcaatcgtctcaatcacaaaaaaaaagataaacgacgcccaactgcgcgtcagcacattcaacggcgactcttttttaatcgtcaccaacaatcccacccacagcaccgcgaaaacggcaacgccaataccaactgaaataatgccaagattcgccgcattcgccaatgccgacgactctccgtacaccacatatgtcgcataccaaaaatcaattttcagaatgcgcaggccggcaatgagttgctccgccgccaagccaatcacaaaaaccgcgccccacaagcgccgatgggcgtcaacaaccagcagaccaaggccggaaacggcaatcagcgtcaccgtccaggcaacaaacgcggcgccgcgcggctcaagcacgctcaaattatcaagcagccactgcgtatcgttcaccgcaatcgcacgcccccaccaatacggcaccacaatggccgcaatcaccagcagcgcataagccagccacaatgcaggatgcgagcgcttacgctcaatatcggccagcgacagcgtcgattcgggaatggacgccaccggatgcttggaaacatcgttatgtttggaaacatcgttgggcatgggcgaaacaccatcggaccgcgtatcgatttcagcctgcacctcaccgctcgcctgctggtcgaccggctgtttctccacgctggaattcaccgccatctacgtttacctcgcgttcgttgttcgacgccacacctgtctgcacaatgcgtcgtctcatgccgcgacgcccatgctaggacggtattgtatcgtgagtgcgccatacgataatgacatggcgccggacataacgccgcaatacctgattttcgctaatcgcaaccatgcttcggcggacgacataagccatacatatgttcataagggcgaaccatatccgaattactcactccgctaacatcaccacataacggcaacatagatacacagccatacttgatatcaggagaacgccgtcgattcgaaatgaaaactgccagccgcccacacaccagctcctttgtttccaaaatcgcacattctacgccgatgtcatgctccaccatgtctcacgccgcggtctcaacataacaggatgggttgtacgaatccacgttgccgagcattcgcacaacccaccattgcgacacatcactgattccgcacattcaatcgctgcaaccaacaggctgcggcgatatttcagcgcgaagagcggcgtatccgaatgacactgatgccagccagcatcagggcaattgcagacagcaccatcggtgttacggacgaaccagttgatgacagttcagatgaattatcatcagcagtagaagactgttgctggccgccatcaccggtctgatcgccgttacccgactggttaccgtcaccggtctgatcaccaccaccaggatttccgccatcaccagactgacggtcaaccgccaattgcgcgagctgcaaactcagtgcacgctgcggggcatccacctcattttgcgtggaaggatcggatgccaacgcctgctttgccttatcaagtagcgtgagcatcttatcccactcatccataggatattccgcagactgcagagagtcagcctgatcaatggccgaacgcagcttagacgtatccacagctttgccgtcagaagtcaacacgtcgctcaagtcatagtaatcaaaatcgacataaccacccgtattctccttggcgtaattgaacaagccgattcgataccccttaaagtgcgacaagctccaatcgtaagtcagcggcccctgctcgtcgccaagcttggaccattgcttaccgtccagactgtaccaatactgaatcgtcaacttaccactcgcattatccagtgtgttgtccgacttgatccacacattggtcgcatcatctggcaatgtcactgtgccgcccgatacaaaggcctcttcagcgtcacgatcaatcgtatcgtcaacgatattaccgtccgcgtccttcacgccattgtcgtagacacgcttgaccacgcccaacgttcgctgtccattttcttgacgcacagcggcataggcaaaactacgggtatatgtagcgaggcctgcggtgtctccatccttcatatgactgacatccatgtgggtttccacagacatggatccgccaaaggtacgctgcgacaaaacgttacgggcggtttcaaaatatgtcaggtcgccataagtgcctttcatatatttggccgtggcggaaaccttgtgcccattggtcaaacgcaaccagccttcacgatcagtgagagaccaatatcggttatctggattatgtccccattcccataccaaatcaagattcgaaccattgggttggtattcttcggcgaccggatattccttctcatcagcaagaccgatcagggaaatatcgtcgatgacgtaatccatgcacgtgccttccgcaccccacgcggtttcgacaatgagtttggaaccttccacattagcgtcggatgggatggagaactcacctgtgatagtagtcgtctccccacgtttcactgttcctgtggccacacgattaattgtgccgtctgcatattgaatcgccacataaaacaggtgggaagtcacagccgatgaatcgacgccgtccatctcatggtcgtatcgaatcgttgcactggcacgatatgtcacgccctgctgcaattttccatccatagattgacccgggccagcgccattgtattcgccacgattcgtcacagcaagactcgtggttccagaaagagaaccatccgtaatcgcggtaagcgtaccattccactgaggggtccacgattcagtcccgttttcgaaatcgccattgtccaccagctcgattccaatcagagaatcgtcaacctgaggaggctcctccagagtccaccaatcctgatcctgataagactgatgaggcgcgtcattatcaaaatcgtccgaattgaccagggaacgctggcgaaccagattctccaaatcagcaggcaaatcaatcagtttgtcgtaggtgtccgacgcgcttacctgattattgtccccaaacacaggccatccgtcatcaccccacgttgcaggaatcaaaccgggaatacgtccggtcggatatgtgtctcggaagaagaatccatgccaagacgtcgtgccatcaccgttgtcgacttcaacaaggctaccttgtgcgaaagcacctagataatactttttggcttcgtatttggagccatcaagcaaatcagtggtgcgcagcagcatcaccgtacgaccgtctttgccccagtaaatcgttggagtatagaaataatcaccgattttgaaagtctgagatccttcaaatccggtaggagtctcaccaagatcatcagtgaactgttcggcagagatgatattctcatggctctccaccaccgtggttaaatcatcggacagcctatattggttgacgccggagataatccaaggactcccttgctcatcaaaatacaatgacggatcatggaatccccgattaagggcaatcttcgtccaaggaccattctcaatatcatcggtgtagtagatataagcgccattaaggttgttcgtattgaataacacgtagaagcggccattgtgatagcgcagcgacggagcccactcgccttcgccatacgagctagctccattgcgcaaggatgaagcatcgctcatagaaatgcgatcatacacgtacgtgactatccaccaattgaccagatcataggatttcataattggagatccgggactgagctccatagtggtactcaccatgtaatacacatcacgaccgtctttgttattcggatcgtccttcgacacacgaataacactgatatccggaacatccgtgttcaacatgggaatggaatacgtgccatcaccgctatcagtcgtggtgtaactgccatccgatggcgttgaagatggcgttgaatcatccgcaaagaccggcattggcgccaaaatcaacccacaagtcgacaacaccgcgatagcactagccgaaattttttgtcgtaaataattcataagtcttttaacctttcatgataagcactcaacatcgagtgcgtattccaatagcatgcccgcacaaatcagcaatgaatgacgataagacattcccgcatatggataagtgatggacattaccactgccaaaacttacgcttgaacaagtaccagttctaggtttcatgtgcggtcatcccgaggctgccgctacgggatgaccgcattaccaagaggtaactagcgcatctcgcgacgcactcgcgctacgatcacaccagtgagagccaagcaagcgacaatcacagcaccagacaagacagaggaaccggtttgtgccaaatccacgccatcgtcattggagccgtcggcattgccatcagtggaatcatcagccagcttcagaccggcacgtgcactattcaatgcagcaagcgcatcttgaacctgctgttcagtagcggattcatcctgcaataccgcctgagccttctgcaatgcgtcagcaaacaccttccagctctcttccgtgtaatcggaagcgttcaggctggaattctcattcactgcgctctgcaaatcagacttgtccaccggagtcgaaggagtttcatcctgcgactccgtgaaagtgtacgtagtgatgtcgtacagctcatcctgagcattcgcaccaccatcggatttgaaggagaacaccacatgatgcacccctgtcacaccctcaagggtggtcgtgtaatcggcgtactcggatccatcaccggcaggaatcgaaatagaagccacaggttcggaatccggatcatcaagacgaatctcaaggatgcctccggctttgccagctgcagtcacagtcagcgaagaggcgccgttattcccgaaatcgacattcgccaaagacgtccactcaccattattaatattgctgagcttctgaccttcggaattgtctgtagtcatatcgaccacgcgcacaccagaagtcaggtcatatgcgttctgaatgccggaatcccatgcaatggtggaagctggaatgcctccatcttgatacgcgtccagattcttcaccgaagagagaccctcatatgtcattgcaatatcggcaatggaaccatcctcgttaaccgtaatcggatcgagatgagtatttcggtagccatgcgccgcgtcaagattaccgccgttcatcaattcctttgccaccgtttgcgcatggtaggtcatataccactggtcgccaagttgaaccatcgcgtgatgattgttgccgccaacaccgaaatacgtgctcggattcttcagaatctcaccctgataagtgaacggccccatcgggttgtctgaagtcatatacgcgatattgccgtaaccgaccgtgttaccatcaattacgttgtcatggctgaaattagtgcaatacgagtagtaataagtaccacctatcttggcaatcccggagtcctcaaacatggcaggtgcgtctatggcctgagcctcaccttcggtatgcagcatgtcatcggacagtttaataacgcgagccgtgttcggatgttcttcctcgcctgtcggaacaccacctccgtaatacaggtagccctgcccgtcatcatccacgaacaccgcgggatcaaacagccagaccacaccagcggattcaggagtaccgcccttaatcaacagctcaccggtttcgtccttccacggaccaacaggagaatccgaggtcagcacaccgataccgctgccgccattggcgaaatacaggaagaacttctctttaccgttgatggtcttatgagcgacggcaggagcccaggaattgctggcccaggtggccaccccctgttctccagccacacgaatgtaaccctcattacgccaattgaccatgtcatcactggacagaacattgatggtctttacttgagcgaacgaattgtccttgatctgcccagtactgtcatattcatagtcataattcaacgagccatcagcattcacagaagtgccatcacccgtagtgtagatatatacgcgtccgttgtattccatagcccacggatcggcgccataccaataatcgataatcgggtttgaatagtcgccgaaagccttggctgccgttgccgtacccgtagtcggcggcacgaatgaggaaccagaatccgaaccggttacggaaatgtcgtcgacaatgaagtcggcattgctcgtgccatacttgttttcaatcaccagcgagggactggtgaaatcaccactaccacctaacgttccagtacctgaaatttgtgtccactcacccgctttcgccgttccggtcgcaatctggtcacatccggaaccattacccgaacaaacagtgatattgaattcaccgtcttccgtggccttgacccacatacttccggtatatgtctgtcctttttccaccttgccatcaagagactggattgcaccagcatcagaggatgtacgatcagtaacgctcaaggcgccactgccaccatgcacatcatccgcagtgacggcaatggacgatgcggagctattccacaccgttccagacttccaaccattaagatcgtcttcgaatccgccgttgacgaccaattcgacgggttcatcggccgacgccgcagtcactccgatagtcgctggaaatacagcccccatgcaacacagcacggatgcagccgcagcagcaaccacacgaccggttttccttgtttgcaatatgtgaatgttataaaccattcagttccctttcctgaatgatggagggcgactcccccccccatcattttttcttcgccgcacaatcgaatcccacgttggttacgaccacatcgcggctcattgcaaagccatgccagaggaacgtccctcaagggcagccatgcagcagccattatataaatgagcgcatttcactcgcgatcgtccttgataacaaattgataacgatatgcacaatgaaaataagttcacataaacgcaacgcaacacatcaaatatgacagtttcatatgccaattacacactttgcataacatatttcaacaaagaatggagacgtacaagcgaactcatctgatgccaccactcatcgcctataaagctggcgtgtcgcgccacaataacatcacagccgataaaacgacaccccgaagttgagcctcattcaacaatgcggccagcttagacacacaaccaacgcttcgcttcatagcaccgaacattgattccagcacagtcacgaccatcttctttgaaggcaatcgtgtttacgccccgggttctaaatagaagtgcaacaccttgtctaaggttggaagtgttcgaagtttctaacttaagaaggtgttgcactcatgggtcaacagtattcgcacctgtcgtccgaggagaggatcctgatcgagaagctgcattgcgaacagcatctgagcattcggcgaaccgcggagaggatcggccgggacaagtccacggtgtcacgcgagctgaggcgcggcctgtggttcgcgtccaacgagaacgggtcgtaccgtccctaccggccgaaacggctgaagaccgggccgtggacctcgggtccgttctattcggcgctggccgcgcagaggaaggcggacctgcgccggcgcggatcccgcaagccgcgccgcatggactcgggcccgttgcgcgcctgggtgctggacgcgctgcgcatgtgtctgttcaatagaaagtgggccgtgtgagcgtgtggatgtcttccatgtgagcggcaggttctggtccacttcagcgtgtggtgagaaacgaacaccggcccgtcctgcctggactagtttcccgagttgaaagtcaaaccgttcggttttctcgggaaaggaaaggaatgacggtaccggtgtccgtacaacaacgtatcagggtgcttgacgcgcatggcatgtcatggaggagcatcgcgaaagaggtgggcgtggcccgcgacacggtcgcgaagtacgccgggagggaggattgctctcccggaccggagcgctccgtatcgcggccgtcgaagctcgatccgttcagggcgacggtggacgggtggctgcaggcggaccggttcatgccccgcaagcagcggcacaccgccaagcgcgtgtacgacagactcgtgtcggagaagggctacgagggctcgtattcgccggtgcagcggtacgtgaaacggtggcgcgaggagcatcgcctcccgtcggacgggtatctggagctcaagtggcatccgggcgaggcgcaggtcgatttcggcatggcgcaggccgtggtcggcggggaccgggtcgacgtgcattgcctggtcgtcacgttcccgtattcgaacatgcgctactgcgtggccctgcccggggagaacgccgaatgcgtgtgcgcggggctgcgcacggtgttcgagcacataggcgcggtccccctgacgctggtgcttgacaacgccaccggcgccggccatcggatcgcgtgggacaaggtcaccgtcgtgcacgtgttcgaactgttcgtggagcattaccggctggagaccaggttctgcaacccgaactcgggcaacgagaagggcagcgtggagaacgcggtcgggttcctgcgccgcaacatcatggtgcccatgctcaacgcagagtcccacggccaactgacccggtacatgctggagcgttgcgacgcgatggccaaggagacgcattaccgcaagggcgcgccgatcggcggcctgttcgccggtgagaagatggatatgcagccgcttcccgccaagccgtacgacgcgatccgttgggaggtgaggaaggccgacaaggacgggcgtgtgcagatcgacggcaactactacctcgccggcccctcgtggcgcggctggactctcgacgtgggtctgcgcgcgttcgacgtgacgatccgcacccaggacggacgcacctgtgccagactgccgcgcgtgtacggggattcgccggccacggtgcgcaaccccgccacgctcctgcccgcgttgagccgcaagacccacgcatggaccgattccaccatccgtgacgatttccccgacaaactcaggatcgccatcgaccgcatggacgccaagacacgcaggaccacgttccgcgtcatcgccaaggccagcgccgcgtccggcttcgaggccgccgtccgggccggagagcacctggtcgaacaggggcacgcgatcgacgaggccagtgtgaccaccatggcccggcgcatcgccgccggcgagaagccgtacgagcagtcggtacccgacctgaccggatacgacgtgttcatgaaaccccgacagccatgggaaaggaaggaggcctgaccatgggaacccaccgtccgccggtcgtcatgcccgacatgaaacgcaggcgcgcgtccaccggcgaaagaatcgcaacgatcatgaccctggccagacggctgcctctgacccgccaggtcctcgccgaccagctcgcggacgcgacccccagccagatggaattcatggaatcgtggatgaacgccgagatcgaatccagggaacgctccaaacgctcacgcctgctcaaggccgccggattccccgccgacaaggagctcggcggctacgactggaccccgatccgcttccccgtcgactacgggcgcgggcagatcacgaccctcgacttcatcgccggccacgacgacctcgtcctgttcggccctcccggcaccggcaagacccacctcgccatcgcgctcggcaggaacgcatgccgcaagggcatacccgcacgctacttcaccgccgcaggcctggtcatgcggctcctcagggcccaatcggacaaccggctcgaccgggaactcgccgcgatcggcaggaccccgctgctcgtcatcgacgaactcggctacgtgcccatcgacgaggacggcagcaggctcctgttccaggtcgtcaccaacgcgtacgagacccagagcatcatctacaccaccaacatcgagttcagcggatggggcaggatcttcggcgaccccaacatggccgccgcgatcatcgaccgcaccgtccaccacggacggatgatccgcttcgagggcgaatcctggcgcaagacccacgccctcatgcaataaccaatgcaataaccaacaaccagcaggaccggccaacgccgaaacggcctgaaacccgccgctcacatggactaaaagaaacgccgaaacggcctactccaacttgacaaaacacatgcgcagggggtggagcccggaactgatcgagggacggttgaaggcccagtacgccggcgacccgtcgatgcggatcagccacgagtgcctctgccagtggatctacgccaagccgcagcgggcgctggacctgcgccagtacctggcgcgcggcaggaaacgccggacgaggaaaaagggcaggaaggcgaaagggccgcgcatcccgatgcgcgtgcccatcgcggaccggcccgaggcggtcggatccaggaaggggttcggccatttcgagtcggacacggtggtcggcgccgcgccgtcgaggcgctgcatgaacacgcaggtggagcgcaggagccgcaggctgttcgcccggctcgtcgacgacaagagcgcgtccgccacggccagggccgaatacgagatcttcaaggacatcccgccggccgcgcgcgtcgaccgcacgtgggacaacggcacggaggcgtccctgcacatgctggtggacgaggcgctgggcatgctcacgtacttcgccgacccgtacagttcctggcagcgtggcagcaacgagaacaggaacggcaggatccgccgctatctgcccaaaggaaccgggttcgaggacttggcccaggaggacctcgacgcgatcgtcggggagatcaacgacacccccatgaagctcctcggctacaaaacgcccaacgaggtatgggacgaggagatcgccaagctacaatcgaaggcagccagcccgaacacaagcgttgcgcttacaaattgaatccggggggcctcatgagccgagggtgtaagggataaggtgtaaagggtaagggtttaaaggcgtaagggtgtaaggggacactcactcctgccggtacagccgcgaatacaatccgccggcctgcagcagttcgtcatgcgtaccggattcgacgatctgcccatgatccatgacatggatgcggtcgaaatcccgaatcgatgcgagtctgtgcgccacgacgatgcacgcattgtcggagtcgagcaacgccgtcatgacatgtcgctcggtatcgttgtccagagcactggtgggttcgtccataagtaggaagtccggtcttccgacgaccggatccatcatcccctcgttgatgccggcaacctcgcacgccctgacgatgtcgtcatccgtcagccacggacggtgcagcgtgatattgtcgcgcaaggtttcgttgaacaccgtggattcctgatgcacatacgccagcctgtcggccttccatcggctgtccgcgtcgtaaatccggcatccgccgtcgttgatggtcaccgtgccacagacgggttcgatgagtccggcgagcagtttcagcagcgtgcttttgcccgagccagtggggccgacgatggcgatcttgtcgccttcaccggcgggaatcatctcgcaaatcttgcgcatataggtggcgaacgccatgatctggctgatgacgccgacgatgccggagaaggtttcgatgaaggcgcgttgcacgtcagcctgcgcgacggtcgcacgctcgaccagcgtcctgttgcgcagggaataaatgacggatacgacgagcaccgccgcgcacaccgtcagggtcagcatcgtcaatggcgctgaataggcgatcatcatgatcaggtagaccacgaggaacaccatcgacacgaccgtcgacggcagactgccggtcacgatctgttcgacgaccatgaccaggttcgcgcggtagatcaggtcaccactggaacggttcccgaagaacgggaactcccgatcgagcacgccggtcatgtatcggcgggacaggtatcgtccgaatcgcacctgcacgcgggtgagcatcatggtgttcaacgcgccgaccgccatcgccgtgaacgctgggcgcgtcgtcttccacgtggccacgggaggcgtcgcaggcgtggtggcgggaggacgtcgcgtttcccgattcccggacgggttcccatctccgagtgtccgccggaggccggcgaccgcagcggtttcggccattgggaggccgaaggcgtgatcggtgtcggatgtgacctgcgcaccgaggtcgagaggaggagcgggttcctcatggccaggatcgtgcccggcaagaccgccggggaaagcgtcggggtgcggctggcgatgttctcgccgctgccggccggcgcgcgcgtcagcgtcacgcacgacaacggcgccgggttcgcccgccacacgcgcctgcgcgacgggctgggcatggacacgtacttcgccgacccgtactccagccggcggcggggaagcaacgagaaccggaacggcatgatccgccggtatctgcccaaacgcagcgagatccggatgggcatggccggggaactgcgggagattgtcgacgaggccgacaaccgtcccatgcgcgtgctggactaccggacgcccgccgaggcattcgccgacgaactgctagaattgcaggaccaacagggggtgttgcacctctaaatagacatcgggcacacggtttgcgcggcggtgagcagtgagtggtgagtattgagcgacgtacggcgactcacgtgcgctcacacagtggtgagcaatccgccgaacaacaccacgagcagggcgatggtttcaatcacgaagtacagaatgaaactcgcccagcttttggtcagtacgttcagcggcgaggtcttccggataatcaccagcagaccaacaaacaccagggcgtatacggcgatgccgatcgccgcccccataatgcccagattcgcggcatttgccagaccggcctgcttgccgtagaccacgtacgtggaataccagaagttgagattgagcatgctgagtcccgcgatgaactgctcacaggccagcccgagcacgaacacgatcagccatggccaggacggcgagacgaccaccgccatcgccaatccgacgtacgtgatcaccacggccacccaaccgaccagtgcgataccttgcggagacactcccccgagcacggccacaatggagtcagtattattcaccgccagcgagcgaccgaaccagtatggcgcgatgatggcgcacagtacggcaagaataatcaacgcccaacgcaacggatgggagcgacggcgctcgatatcagccaaagacaaatcggtctcgggtatggaagcctcggggtgcctggaaacctcgacggtctctactttgccgcctacgatttccgtcgcctcgttaggttcttgctcgttggattcctgctccatgcaccgcctcgccgattacctgcttattgccatgtattgccatgccgattattgcgatgcctatcttagcgtgcgtgttgggcaagtacctgatgttccctgtggtttcgcgcactgattggatacagacaggctactgctgttgcccgtctgtatccggcgacttgtccgccgctgtatccgtctgttcctcaggcaacgtattggcagcctgttccttacgccgcctgccgtgcagcagggcctcgagcatgtcgacctgacgctccagttcgtcgatacgacgtacctgctgcgaaatcagcaagtcgcgtaggtcattgttctgctctttgcgggagacggggaagatgatggcgcgacgttcgggcgatacgtggaaatcggattcgctgccggtaccagccggaagtgacgattccgccgagtcgcgccaagctctcgctgctcgcgcactctccggaatgtttggtgcgcccgcggctcccgagcggaaaagctccgaatctgaagcccccccccccagcttattttccacgccggctttggcattgccggagttcaggatttcgtcttgcgattcacgccagcgggcaaggcaacgttcgatgcgcttgtacccgattagagccggatccaatccggcttcacggaacatgcgcacgggtgaggcaccttcgttgtagtggactacacagtaacgcttgaaatcatcggtataggtgatgcgcttcgccgtggcttccgccactgccgacaacgacttcagatacttgatctcctcggggctaaaagtccctccaccactggtcatcctcatcccttacactcgttggaaggctcattgcacaccccccttgattatggggtgaatgccatagttcgggatagtaatacttataattcggacatgcctaacccctagtaggggcgtttttatccccgtttaagtggagcctgagtagtggctggacggcaactgaacgataatcggcccacgaatggggtatacaggcccatccttcacctcccctacgattgtgttcgcttggcgattgttaccgagcctgcgtgaaacgtttgttgtggtgaaacacaagttattttcgatgcccggccccattacattcaaatcaaaatgccatacattgcccataagattcggagatggtccacaagtcatccgtctgagatgccgccaatatgacaaatggccgatctgaataatcagatcggccattgttatagctgctcagtcataagcagcagtcaagctcacgcgttgagagcgcgcttggtggaacgggacttgacgaacacggtcaccgcggcacccgcgatcagcagaccgatcacggagaacagcatggttccggcggcaccggtgagcggcagctgggtgatgttcttgacgttggtgacctggaaggtgcccttgttgtccttggacaggttccaggcatccttaccagcgaaggtggcagcagcatctgcggttgcaccggtagtgatcgtgaacttgccaacgaaggtgccgttgtagccagtcgggaccttcgtctcaatcacggtgtaggtggtgttgagcttaagaccgttcagagtgtacttaccctcagcgttggattgcagtgtgtccgtggcgccttcagggtaaatgccatcagcattggcggtcggcagagaatacgcaccgttagagccattgaacttaagcggagtcttcgctttgagctcgtcagcggacagaccgctaacatcgccttcgtacacttggaactcagcaccagtcagagcagcagcgttcttgtcgactttctgccaagtcacggcaccagccttggtggtttcttccttgctgctcttcaggtcgacaacgccggcagcggcgagaacgccagtggcgttgttcacggacggcgcggcgcccgtgatagcagtgccagcgagaatcggagcattgccattccacacgagcttgtgagtgtcattatcttcgacgaccagctttccactctggtcgacaatcaagtacagaccaccctcagcgaaggtgaaggtctgggtcttgccaccgttagaagccgtcggggtaatgtccgtgacagccagatccttaagcgcgttcacaaaagcggtggtctgcgcggcagtcagggtagtgttgcccagccaggcccactcgttcagggaatcacccttggtctggtcgttgtaaccagcagcagcgaaagcagcatccactgcctcaccggagaccaaaccctccagctcaacgccagtgttgccatcagacacatacttggcgagctcaacgtacttgaacatgcgcaggttagcctgcaggtcagcggtgtcaaccggcttggtgtagaactggtttgcatccgtggcgttgactgtgatagtcgtgctggagatgttggcctcagccgcgttggcggtggtggcgccgaaggccatgccaccgagcagggtggccgcagcagcgacacccgcgaaaagcttcctcaacttcatgagaaaccctctcttccttattgtgattgattttcttgcaatcgcggaggctgcagacccacagcagggcctccgtgatccgcaaatccttattgttttttcgggagggaagccttcattgacccccctcagtccgccttcggcggccagctcccctcagcgagaggagccaaaaccacctcaagtttcttgaaatcagaccagctgacgcttacgccacaccgtgtagcccgcagcagccaacagggccatcaggcccacgccaccgccgaacaccatccagtcacgaccagtcgtgccaccggtcagcggcagactggagatagccacatacttgttcgtgaactgtgccgactccgtattcgttcggtcggaatcgttctcgccgtactcgtaagagacaacggcatccgtcctggagaccgtgaccttgacggtcaccttatcgttgtcatacttccaaccggcagcaggcttttcggtgtcctccgaagcctcgaacgtgtagaccaaattgtcagcaccggtcggaaccctgaacttcaggtccccattgccgaagccaaccgtcgcgctcgcgccgctagcagtcaattcgtccttggacacagtcgtagtcagtccattgttggccaagccggtaacgtcagcgcacttaccagcattcgcatccgtgctatccacgcacttcaggttgaagccgaagtccgaattagcagcatgtccctgcacaaccttcgtcaccttgacatccgaagcgggcaaggtcacgtaagaaggcgtgttggttaccgtgaaggcaccggattgtgcggtcaaaccttgtagcttgaggtcagtcttatcaaccttggagtcatagccttcaaccttgacctcggaaaccgagtatgtgtgcccctcagggccggcaggcaccgtgaactcgtgagtccagttgccggcggcattcagagttgctgaaccgttggcataatcctcgccgtcctgcttgagctggacctgcacggaatcattcgcgtgattctcgttgtcgtcggaccaagtcttcgtcaccgtaatcttggagaccggaagggtgatggtcggcttctgcaggtaggcggcggtctgcggatcgctcgtcgtcgtgccgccctgcgaggaggtcaccacggtcttgtaatcgacagtggcgctggagttgtcgttcgtgtagaagttgttgtcgccggaggcattggcatcgtccttgtggttcttaacagcctcgtcgaacgcagcctgcgtcggcttgacattgaagctcaccgtgtaggtgacgccgtcctcaagcgtgtcgtcgttggacatgaccggccaagacacggtgccatcagccgcaaccgtcgcctccggggcgtcatcccacgccgtgatctggccgttccgggtcttcgtgtacgtgaagcccgcgggctctccattctcggaggcgctgtcggagctcacgacccagctggacagcctgtcgtgaatcgtcacgtcggcatactcagccgtcttggtgatctcctgataaatggactcgaagatgttgttcagctggccggcatccgtggcggccttgtagtagctgctggtctcggcgcggtcaccgaggttggcgttccaagactttccccacaaatgctcactgctcgttgcagtggcatccgggtagttgctggagatgccgtgcatgtacttgttcaggttgctcgaggtgtcgccggggttggcaccgctgacgacgccgatcgagtagatggtcgtcccggcgtccttcaggctcttcgccttgttcaccgcggtggcggcgacggtggggtcaaacccgctgccgtggttcggctcgccgtcggtgaagaagatgacgaccttcttcgcgttggcgcgaggctgatacgttagcgccgcctgggcgcggttgaaggcgtagtcggcggaggtcgcgccggacgcgctcaggccgttaaccgtgctcgtcagtccggagacgtcgtacgtcaggttgctgacgatctgcgtgtagttgtaggaggaccagccttcgcggtaaaagtcattgccgacgctggtcttctcggtgccggcgaacttcaccagggcgatgcggttccgctggctctggtcggtaatcttcgcgttctctgcagccgtcgcattgatgaatttattgaccgcggtcttgagcgagtcaatcttcgtaggctggttccaaccgctagcgatcttttcggccatcgaaccggacacatccaacaccagcacgatgtcgagtggctggttcgtcacgatctcgcccgtacccgcgctcttcgcaccggtgacgttcaacgccaccgtgtacgtgccgtcttcattggcggtaacggtcttctcgcgggccggagcagacaacgtcggatcatccggcacgccgtttgttccctcggtggaaagaggagcaggcgcgctggcggccgccttctcatcggtggtctgcgattgtgtcgtggaggcattcccatcgtccgccatggcggtcgcgctcacaccggcgacgccaccgagcatcgccacggcggcaacgatcgccactaaccgtttgcctttcctgcccgccgcggcccctaccgctgcgaaccattctgcaattctcttcataaccttgcctgtctcttacgatcacgtacgccaaaacccggcgttacgcttataaggcgttacggtattaagcaaaaagcacgaatgcgtacacccgggtagagggaattttttacccgacactgaaaagaaccttggaatttttgaaaagtggcaccctcgtcatccaccctgcgataacgcacttttcttctcgacggggcgtgccggtcccaccatctgggaactgaggcggatttgccgccgctgcgcgggggccggagttactgacgaccgtcagtatgccactgctccgcatgtgtgcagtatcacataccgctacgcatacacggagacatactacatgcaatttctgtgaacgcaaacatacgactcaccaaggccgtgttctgttgcgggcggtggcgttacgggcaatgttgtgggtagtaccctagccacaaacctatatagtggagcggatgacgggaatcgaacccgcgtaatcagtttggaagactgaggctctaccattgagctacatccgcgttaagcgtcgcttttggcgacttgagttattatacatatttcttcggggatggcaaacgcgtgtggctgcagcaggaccagccaatctagttgatggattgcggctttgccgaggactcccctcagtcgcctacggcgacagctcccctcaaagaggggagctagaaaccgtcgaaatcacaaatggatgagctgggactcgtatggttggaggtcggcgtccatcgcgttcagaatgccgttgcaggcgttgaggtgggcgtgctgcgggtcgggcgagaagttgaacaggccgaccagcgtcttgccttcgtgctgacgaatcacagcgagcaccgaatcgttgaacgtatcccacgtggacacccaagcgtcaggcgcgaagcagggatcgttgcgcatcgcgcgcaaatcctccatgcccttccacagctggttctgcaacgtaccggacttcttgcgcagagcggccttggtccagtcgaacttactacggtgcagattgcggctgtcttccacgcgatccgggtcttccttgtaatcccagccgttgagctgggcgatttcgtcgccgcagttgagcatcgggaaaccgcgcaggaagctcatggcgtggtgcatcatgaggtcgcgatccaccgagatctctagcagtggcttgtcgtgcgtgatgatggccttttcgatgccgcacaggctggcggtggtgccgcaactgcgggcgtcgcgcgtggcttcgtcgtagttgtagagttcgcccatcgaccagctgccgggggttgcgccctcgtagaagtggtacaggaattccttgtgcttgagcgggtcgatgtcgaggtaacgctccacgtcttcgtccaagccccagccgatgtcgtcatggcagcgcaaataattcacgaaccagcagttttcgggcagcgagttgagcttgtcgatctggttcttgagcaggcgcacgtcgcggctggcgagcgcgctccacaggttaaccatgatggagacgttgtacagcatgtggcactcgggggcctcgggcgtgccgaagtaggcggcgagctccttgggggccatgaccacctcgcccttaagcaccacggccgggcagacgcattccaaaatgatgcgcagcatgcgcacgatggtgtggacctgcggcaggttgcggcaattggtgccaagctgcttccagatgtacggcacggcgtcgatgcggaacacctcgacaccgaggttggccaggcgcatcacgctgcccatcatggctacgagcaccttcgggttgcggtagttgaggtcccactggaacgggtagaactgggtcatcacccacttgttcatcttctcattccaggtgaagttgccgggcgcggtgttcgggaagacctgcggcacatcccggtcgtaccggtcggggatggtgcggtccgggtagcagaagtaatagtcctgatactcgggatcgccggcttcggctgccttggcccagcggtgggtggaggcggtgtggttcatcacgaagtcgatgcacagactgatgccggcgcggcgcagcttcttggccagcgcggcgaggtcttcgttggtgccgagcttcgggtccacggtatcgaagtcctggaccgcatagccaccgtcgttgttcgggtgcggcatgtcaagcagcggcatcaagtgcaggtaggtgagcttctgctccttcaagtacggaatcttgtcggcaagtttcttgaggtcgccggcgaacaggtcggtgtacatggtcatgccgaacatatcgccgcgcttgtaccagcccgggtcctgctcgcgggttttgtcgagacgcttcaaatcggcgggacggtcagcgtaggctgcggccatgcttgcgacgagtgcgtcgaaggcatcatgatcgttgtacaggctcatgaagagctgttcgagttcgtcttgatgagcagcaaggcgagcgttgaacacggcgctcgaagcgggacgcttggcggttgcggacttggtcgccgctgccttggaggtacgggccgaacggacggcagtcgtcgccttagtcgctgtggttctggccgtacgagacgtcgtgcgcttggttgcggttgtcttggttgctgtggaagtcgtagcggttttggccgctcgggttgatgctgtcttggcagccttcttcgccacctcggtcttctcgaccgattccactgcctgtgccgactggttgctttgagccaccggaaactcctttgtctctatccgttgcccacgtcaatcgtttgacgctttgtattacaaagtatcaaaccggttcgacaatcgcaacccaagactcgccgagccaccggcgctattccacagaaatcgtcaccaccgcggaggcaatcggaccatcgtggctcagggaaatatggatatgcggcatcgaccccgcaccgaaagccgagcgctgcgccgaacgcgcattccgccgctcctgcatcactgcataaggcccgttatcggaagcaggggaataagcagaggaatagcgagcgcctgcagccgaattcgcgtaatcagtttggaagactgacgccgtccccttacccagagacacatgcggcacaccacgggaatcatccaagatctcgatttcaggccacgggaaattatcaagcgtgaacggatagggggcatcgccaagataatcgcaccacgctttgaggaacgcctccttgcctgcccacttggcggacagatgcacggcctcgtcatcgttcttcagccgtgcacgatccgccgcctgacgtacctcacgaacggaaaacagcgagcgcatgcgcgagccgggttcagacagctgctcggcgaatgcggcgacgtcaaccacgtcatgacctaaaccaaatgtgcccatagcacctattatcagccattcaacacgttgacaacacatccagaataacgaggttcacacggaacgcggcatccacaaacggaaaccctcggccgctccgcaagccgaatcctgaaagtcaacaccaagtcaaactgttgactaacggtggacacggcgtaaaatgtcgatattccgcccgacactccaatacgtaaatcgattgacgtcaaacgtttgactttttaacgcggttaacacaatgatccaatgaaggataacttcacaacaaccaaccacaaccagccaatgaagccagcaaggaggtagaaccgtggtcacgatgaagcaaatcgccaaccgcgccggcgtttccatctccaccgtctctctggtgctcaacaaccgcgatatcggccgcgtcagccccgatgtcgccgagcgagtccgcgacatcgccgccgaactcggttacctgaccaaccgtctggccagcgggcttcgcaccagcagtagccgcaccatcggattccccagcgacgaagtggccaccacgccgtttgccggccgcatgattgagggcgcgcaagacgccgtccgcatgcccgcgttcttcgacaagcacccggatgtcgacggcttcttctgcttcaacgacacccacgcttggaccatctacaccgaggccacccgtcgcgggctgatcatcggcaaagacatcgcggtggtcggagtcgacaaccaccagattgtggccgaagcgctggatccgccgctttccactgtggaactgccgcattacgagatgggctactgggcagtcggtaagctggtctcgctcatcgaaggcgaggcacccgatccctttcctcgtgccggatacccggtcgagaaggttcagccgccgccactgagcgagcagtcaccccagcttgaatgccagctgcgcatcaagcaatcctgggtccggccccgctcccagcgatagcctgcccaaaaatcacgcatccatcctacttgacccggtttcgactgtatatcgaaggcgctattgctgttttcgtgggtggtggttcgttgttgaaccgttgtgggagtaagagacgacgaactgacatccacgaaaacagcaatagcgccaaaaaacaatagggtcgggaagaacaccgtaaatgacgttcttcccgaccctaatcgcgagacactcccctcagccggcattcaccgaccggggggagccagaggcatcaggcctcgtagtagccgtcggcaccgaggcgggcgtccgggttgaggagcatcgccttttcgacctcgtggtggtcgtagccacggtgatcctcgcggaagcgacggttgtcgatcggctcgtagagcgcggcgcgacccatcatgccttcctcaaggtgacgctggccggcagccaggcgggcgttggcacgctcacgccaagcttccagtgcggcctcaccatcggccttggccacggccgcctcgaaggcaccggggtgaaccagggccacgaagccggaaacatgtccgaagccgagcgaggtggccagaccggccttgaccgggcgaccagcggtctcgcgaccgaactcgtcctcgccactgccgatgcgcaggggcttcctaacccagaccatgtggtcgtcgcgctggagcttcggatccacgcagtcgagcgccgcgttcgccggaatcacgccggacttgaacagctgcgtcagaccgttgacctggaagatgcaggcaccacccttggcgtggccggtaagcgtcttctgcgagatcacgaacagcgggttgccgtcggtgcggccgatggcgtgggccagcgtgttgtgcagctcggattcgttcgggtcgttggcgttggtggacgtgtcgtgcttggagaccacggcgatgtcgtcggctgagacgccgagcttagctaggtcgtgcacgagcttggagtccttgccgccgagaccggcagccagggcaccgaggcccggagccggaatcgaggtgtgagcaccatccgcgtaggagtggatgaagccgaccacggccgcaaccggcaggccgagcttttcggcgatgtcaccgcgggtcacgaggatcgtgccgccgccctgggattccaggaagccgccacggcgacgatcgttcgcgcggctgaagaagcgcgcgtcgatgcccttgccgtacatttcctccgagttggcggtggcgttcatgttgccgaagccgatcacggattccacgccgatgtcgtcgatcgcaccggtgaccacgaagtcggccttgccgagggcgatcttgtcgacgccctcttcaagggagacggccgcggtggcgcaggcggagaccggctgaatcatgttgccgtagccgccgatgtaggactgcatcacgtgagccgcgaccacgttcggcagggcttcctgcaggatgtcggtcgggatctcgtggttgaggaagcggtcgaggtacagcttacgcatcgacatcatgccgccgaagccggtgccctgggtcgaagccaccagcgaggggtggatggactcgaggatttcggccggggtgaagccggcgcccaggtaggcgtccacagtggtgacgatgttccacaaggcgatcttgtcgacgtcgccgaccatcgaggcgggaatgccccatcgggtcgggtcgaagcccttcgggaactggccgccgactgtgcgggtcatggtggcgcggcgcggcacgcggatcatcgagccggcgtggcgggtcacgttccattcgccggattcctcatccggggcgatggtggtgtgagcctcgtccaacttgacgtattcggcggcgacttcgcgggtgggcacagagaaggtgacgtcgtggtcgaggaagacctcggcttcctcttcgtcagcaccgtccttgtagtcgttgcccatgccttcctcgaacgggcggatgccggagcgggccacgacctcgtcgtggtagcgctcggcgatgtcctcttcgggcacaaggttgccgtcggtgtcgtaccagccgggcttcgggctgtcggcccaagtcagcaggcccatgttccacgcgagttcgagcactgcgccggcgctgaggtcgacggtgccgtccgagtggatgccgagttcggcctgggcgcgcgtacgaccggagccccacgggcccagctcgccgacggagacgatgacgatttcgtcttccggcttggcggtgacgttggcccagtcgttgagatcgaccggggcctgcttggtgacgatcggggtgggcagcgccttgatctgctgcccacgcgaggagtcggacagtccagtggactttccggcgacggagccatccgtttcctgagacgaggccgcagcagcttccttctcggcgtcggccatggcctccgcacgcagggccttgatgtcgatgggctcggagccgaggccaccggtcaggtccacatcgagcggggccttgagggcctgctcgcgcgattcggcagtgcacaggtcgagcagcttggccgcaatctgtgcggtggagtaggtgcggatgccgtgacgctcaacgacggcgaccagcgggtcgttaccgcccatcaggccggtgccacgcacccagccgatcttcgggtgagcgaaggtgacgcggctcgaccacaccttttcagcgcgggcacggttgacgatggcgtcaaaggcgctcttgacttcaccgtaggcaccgtcgccgccgaatacgccgcggttcggggaaccgggcagcaccacgtggagcttgtgctgcacgttggtgtcggcaccgatgtggctgaagccggcgatggcgcgttccacgccccacagcatcagtcgggcctgcgattcgaacaggtcgccggagtcggcgagcgtgccatggaccggcggagcggcgaacgggaagaacagggtcggctcccacgcgggcttcagaatcgtggtggtagcaccggaggtcttcttctgctcgtggcccacccagtcgaccagtgcgtcgacgtcgcggtagctggagaggttggccggaaccagccacagcttggcgttgccggtagcgtgctcgcggtaggcccgctcagcccaagccttaatggacggcttgaagctgtgcgaggtggccaccacagtggcaccgcctgcgagcaggccttcgaccacctgagcggcaatcgagttcgggctcacgccggtgacgatggcgatatcattcgcgtaacgggaggcgttcttgttggacgcaacctgttcgagggcctcggagccggccttctggaaggcggccttgagttcttcgctctccgactcgttggcgaaccactgggcttcggcggcgatggtcttgccaaggccgatgaagctgccgttcagggcggcgggatcgttgtcgtagtaggcgcgggcgaggtcttcacgggcggaggcccaccgatcatcgaagaggatggccttgttggcgtcgaagcgcggagcgacctgcttgggccagtcggagccaagttcggcttcaaccgcggccacgacggcggcgttctcgtcctcggattcttccggagccggagcggccacgccgagctcgttcagcacgaagcgggcggtggcggcgagcacgccgttggaaccggtgatcttctcggcgaaggcgtcgagcgcggcggaatcgaccacagcgccaccagcggcaccaccggcggacggcagggccacggcaacacccttgagctgggcgacgacctcaacggccgcatcaatcagcttgtcggcttccggcttgttctgcacggcggcggtgggcagcttggccaggtcgccgccacgggagctgacaccctcgcgagtgtcgagcagcagtgcggcgagcacgctggccacccaaccttcaccgagctgccatacgttggtcacgcggtcgcggatgtactgctgcttgacgccggcggcaccgaacagcgagcgcaggcggtcgcgcagcgcctcggatagcacggcaccgaacggcttgtagttcggggcggccttgttgacgatttgggcgagcttgtcgagcgtcgcttcagcagcaccgtccacgctggcgactcccagctcggaactgatgtccatgagcagctggttgcggcgagaagagacaccgttagtcagggtgtcggtggtgtcgttgctgccgatctggtcgatgcgcaccttggcggagtaggccatgagcacgccgatggcatcggaagccttgaagggcaggtcggcgacggcggcaccggacggcgcgccggccgcggcctgccctgattgcaggccgcgcgaggagtcggacagtccagtggactgtccggcgacggagccatccgttgtctgagcagcctcagtcacggcatttgccggagcggcaccggaaccgagctcggcaacggcggaaccaccggcaggagcggtttcgaccggggccgaggccgcagcctcttccggctcatcgtcgggaaccagcgaatcggtgtcggtcatgtagacgcggccttcatcgcggccgacgttgtagacgaccgtatcgttgccggcgaactcgggcagatgcagggtcttggcaccgaggttggccagggtcggggcgttgccgaggccgacttcgacgtattcttccacgccgaggccgccctgttcgcgctgaccgaagagcagcgcctgggtttcaatccaacgcaccggggaggcgaactgccaggagagcagttcggtcaagagcagacggccgagcttctggtcgtcatcggcgtaggaatcccacacggccgggtcgtcgagcgcggccttgatacgctcggacggcacgacttcgaggatcttggcggcgaattccttggtcatctcgaacggggtggccaccaggttcgggatgtagcggtccaccagacggccacggtagtcgatgtaagcgggaagcagcgcgtcgagcttgtcgcggaattccggcacgcccttgcgcagcagtgtggagtggaacggcacatcgatgccgggcaccagcatgaacgcgggcttgccaccgaatgcggccacgcggcgggcggaatcggccttcagagccttgagtccggcgatcgtaccggcgatggcgtactgctggccggcgaggttgtagttcacgatctccaggaattcgccggacgccttggccacggattccacgtattccttgacgtgcgcgtcgtccacaccgaactggttcgggcgcagggcacccatgcggtagttggagcgaccctgtgcgtcacgctcgatgaggtggtgcatggtggaaccacggtggaacacgagctccagcacggtttccagcggaatcacgtcggcgaacgcggacaacgcgttgtattcgccgagcgagtggccagcgaagtatgcaggccagatatcggcgccggcttcgcgcagacgggcggtctgggcaaaagcaaccgtcgcgagcgccacctgcgtgaactgcgtcaggttgagcaggccttcggggtgacggtaggtcacgccgttggcggtgagctccttcgggttatcgcgcacgaggcccaggatcgagaagccgagcttggagcgggtgagcttgtcggcgcgctcccacacgtcgcgggcggcggcggacttggcacgctcgtccagaaccatgccctgcttctggatgccctggccggggtagacgaaggcggcgcgcggtgcgcggaccagtgcggtgccgcgggagacgagctggccgtcgatacggcaggtgacttcgagggtcatgccgccgtggcgcaccttgccgacgcgctcgacggagatttcgacggtgtcgtcaagctgaaccatgccgtacatgttgtaggtccagccggcaatctcgtagtgggcatccttctcgtccagcgcctgcacggcgtgctgggcggtggcggacagccacatgccgtgcacaagcggagcggccaaaccggagatgcgagcgccacgagtggaggtgtggatcgggttgaagtcgccggaagtgcgggcgaaggcggtcatgtcgtgtggggcgacgaccttcacgcggcgcagcagacggcgcggcgtgggcgcgatctcctcgtgctcggcgtcgccgaactcgggggcgtctgccggcaaagcatcggagtagacgcggccgcggatcgcgaaacgctcggtttcgcgggcaagcagcgtgccgtcggcagcggtgtgggtcacgtggatggtgaccacgcggccggaggcggactcgaagtaatcctcagcccaagacttcagggtgatggtttcaccggtgtgcttaagcaggtcctcctcgttcacctcaagttcgatgaggtggtcgaggtggacggcgttgagcaggccttcaatcaccgggtagcccttgacgtacacggagccgagcgccgtgtaaatcgccggccaggccgggccgaccagcgcatcgggagcgatgcggctgggctgcagggtcgtcggcagagcggcgccggtggccgcttcgtggtcgaagccgaggttggcggagagggtgtaggcggcggtggcggtagcaaacggacgctcgtcagaggtcttgccgtcaagctgcggcatctcggtgagcttgtcgccggtgatggcggtgttgccgatgcctgcggtggcggcgagcatcgcgtagacgtccggaatcaggcgttcgcggtccacgaccggcacacggccgggctcggtgccttccacgatgagcgggatgacgatatcgcgcacggcgtgcttggaggtgccgccgtccgggtcgttgtcccagtaggtgtcgaggtggatgtccagatcgtacttgccggccgcggcgtcaaacgcgcggatctcgtagtactggtcgcccagggcggtgccgtaggcggggttgtcggtgatgtggccgacccaggagatgttcggggacttgcggatgaagtcctcggcgctggtggcctcgccgagtgcggcgaaatcgtcgttctcagcggcatcggcggcctgctgttcgtcctgcacgcgcttgatggcggcggtttcgaagcggccgaggatgtcggcgatcggctcgtcgatggtggtgatgccggccacggagatcgggccggggatggcacgcacggaatcggcggagtagcgctggtcttcggactgccagagctggtcctgaccccaccaacgcagcaggtcgttgtcgatgacgggcacgaacggcatgggcttggggtattcgcgcacgagcaccgggaaccaagccacgtcggccggaaccaccttaagttcggcggtctgcgggtaggccagtgcgagcttttcgagtgcgggggccggatcggcgagaatgtcgtcgtgggtcagcaggtcagcggcagctgcctcttcagcagaaacgccatcagcggcgaacagcttggaggtgaattcgccggagtccgtgtcgttcacacgggcttcgatgcgctgcagcaggtgctggaagcggtcggcgtaagtcgggtcggcccacgggaaggcgagttcggcgaagcgccgcgcccactcaaggtaggtcatggaggccaggtctccgaagtaaggcttggcggtcttgttcagggcttcgatgatttccttgcggcgggagtcgagctcttcggggtgcttcatgacgcgcacgagcagacggccgcattcggcggagtcgttctcgagctcgtaaatgtcggcgtgcaggtggctcaggccggaggacatgccgccgacggacttgccggacggcacccagtgggcggcctgcggggcgaacacgtcgtcggacttggcgtcggccggaatgccgggcgtcttgacgagcagctgcttgacttcggggctggtgtgagcctccttggcggtcatcgcggcggtaccgataagcacaccgtcgaccggcatgtcgggcaggccgtaggcgtgggcccactggccggaaatgtagtcggcagcgcgttcaggggtgccgatgccgccgccggcgaccagcacgaggttgtcgcaggcgcgcacttcggcgtaggtggcggcaagcaggtcatccagcgcttcccagctgtggtggccgccggcttcaccgccctcaacctgaaccatgatggtggtgggggccacggccttggcgatacgcacaacctggcgaatctggtcaacggtgccgggcttgaagctcacgtacggcaggccgtcagcctgcaggttcttgatgagctccacggcttcgtccagctcagggatgccggcggagacgaccacgccgtcgatcggcgcgccggatgtgcgcttcttgggcacgatgcgggaggagccgaactgcaggttccacaggtaacggtccatgaacatcgcgttgaattcgaccgtgcggccttcctccagctcgtcttcgagggcagcgatgtggcggtcgaatacttcggcggtcacctggccgccgccggcgagctcggcccagtagccggcgttggccgctgcggccacgatttccggttccacggtggtgggggtcatgccgggcagcagcaccggcggcttgccggtgagcttggagaacttggtgaccagcttggcgccggccggggtgttgatgacgcgcggggcgaacgccttccagttctgggtgcgctcaggctcgctttccagcatggagagcgtggagcgctcggccagcgtggtggcttcgaccacgccgatgccggcgccctgcaccacgttgccgatcagcttgccgagcgtgttgccggggccgaggtccacgatccacagcttggacgggtcggcgtcgtcgaacagcgccttgacgcgggcgttccagtccacgtggttcaggagcacttcctcggcgagtgcacgggtgcgcttctggtcgaagccgcaggcgccggcccaggccacggtctgttcgacggcgtcggccatgagcggcgagtggaagggcagggtgacctcaaggtattcgagggtcgggttgaacacggtgccgccgtggagcttctgctcgcgcagcttggcctgatgctggtgttcgcgctcggcttcgagggcgaaagcggccaggtcttccgggtagccggacagcacgtggtggttgtcggagttggtgacggcgatggagatcgggccgcgagcgttgttgacgcgggccaccagagcctcgacctgggcgcgggtggcgcccttgacggagagcatcgggctggcttcgccatacttggggttcaggcccagttcgcgcacgcggcgggttccggcggcgccgatcagggcggccacggccagaatctcgttgagggtcttgccggcggcctcgatggagccggcggcctcgatggcgcgggtcatgtgcacggcgagcacgccctgggagtggccgagaacggcgagcggcttggcctgggccacgctgtagccgaggtgttcgaggtcgagcagggcgccgagctgggtcagcgccacgccttccacggacgcggtggcgtcggctgcggcgccgaggcgtgccgggttcggggcgaagccgaacaggtcgaccggacggccggtggtggccagcaggtcggcggcgaccggggtgagcagtcggccggctgcggcgacgtggccgcgcagggcctcgtcaaggctgggatcggtggtctggtctgccagggctaccggccacggggtggactggccggcgaaggcgagcgcatggggctcggtggctaggcgattgaggaagaaggtggtcattgctttccttacttgtgtttggttgacgtcttcaaaaatcagaggggctggttgccgtggtgtttggtggtgcgcttgacgcgccgcttggtggcgagcgtggccagcgattcgacaatcacctcacgggtctgttcggggtcgatcatgccgtcgatctgcccgatttccagtgacaggttcgcgttgacggtgctggtctcgtactccttgatgtacttggcccgcagcgcatcgacgtcctgtccggaggccttggccttggccaggtcgtggcggtggatgatgttcaccgcgccggccgcgccgagcaccgcgatctgggaggagggccacgcgaagttcaggtccgcgccgatggccttggatcccatcacgatgtacgcgccgccgaacgccttgcgcaacaccacggtcaccatcggtacctgtgcgttggcgtaggcgtagatcaccttggcgccgcggcggatgatgccggcgtgttcctggtcggagccgggcttgtagccgggcacatccacgagggtgaccacgggcaggttgaacgcgtcgcacaggcgtacgaatcgggcgactttctcggacgagtcgacgtccaggatgccggcgagcacgttcggctggttcgccacgatgccaaccggcttgccgtcgatgcaggcgaagccgacgagcgcggaggcgccgaacagttcctgcacctgcacgaattcgccgtaatcgacgatgcaacgaatcacttcgagcatgtcgtaaggctgacgttcgttggtgggcacgatggtggcaagtcgcttggcggtctcgcgttcggcgcgggtgacggcgtatgcgtagaccggcggcttgctttcgctgttggacggcaggtaggcgagcacggtgcgcgcatagtcgatggcgtcggattcgtcctcgccgaggtagtgggccacgccggacacccggttgtgcacttcgccgccgccgaggtcggccatggagatggtctcgccggtcgaggccttgaccacgtccggtccggtgacgaacatgttcgagttctcacgggtcatgatgatgaggtccgtcagggccgggcagtagacggcaccgccggcgcaggggccgagaatcaggctcagttggggcacgaagccgctggcctcgcaagtcttgcggaagatgcgaccgtactgggtcagggcggccacgccctcctggatgcgggcgccgccggagtccacgatggccacgatcggcactttgaggtcgatggccatgtccatcagtcggcagatcttctcgccttcggcggtgccgagggtgccgcccttgacggagaagtcctgggcgtagacggccactttgcggccgtagacctggccgaagccggtgatgacggccgcaccggcgttgccgccggcgatattgccgccctggaagcggccgatctcctcgaacgtgccggtgtcgaagagcaggtcgaggcgttcgcgcgcggttttcttgcctttggcgtgctgcttgtcgcgggcgcgctcttcggcggcgcgggccagttcggcggccttgaccacagcggtgcgcagcggctggtgggccgaaggctgtgcggcgttggcggccgaggccgcagccgcggccttcacggcctgcgaatccatgatgtcagtcattgccaccctccttcttggcgtcggtggccttatcggctccttctgacgagggagctgtcgacgcagccgcctgagggagagatcccggcgcagccgcagcagccttggccttgccggcgttcacgtccagcgtgaccagcgtgtcgccggcctccacgccgtcggccgggccaacgaaaatcttcttcacttcgccggcggccggcgcgtacacgtagttctccatcttcatggattcgagcaccaccagaaggtcgcccttggccacttgctggccttcggacacgttgatgcgcgtgaccacggcctgcatcggggaggcgatgacgccggatttggcgccgtcgttggccgcagcggcactggaggccacgttgtgcagtcccgcaccgcgcaacggctgggtgggtcgcttggcaccgcgggcgcgggccgagccggtgatgttctccacgatgtcgagtggcacggtgagcttgacgcggcggttgttcatctcgatgacgaacgtctccgacttggacttgtcgggcgcggccggggcagcggcacccggggcggcggccaaggaggccggctggccggaggcggcggaagccggtgtgcggttcaggtacgtgcgctccagccacttggtggacacagcgaacgggtggccatgctcggcggtgaagtcgtcgttgcggaagatttccttgaacagcggaatcggcgtgggcacgccttcgatcacaagctcatcgagcacgcggcgcacacgggccacggcgtcgagacggttctgggcggtgacgatgaccttgcccatcatcgaatcgaacttcggggagatggtgtcgccctgttccacaccggtatcgatgcgcacgccggggccggccggccactggatcttctccaaggtgccggagccgggggtcaggttggtggccgggtcttcgctggtgatgcgcagttcgaagctgtggccgcgcagttcgggggcgcgggtgagctcgccaccggcggcgatattgagctgttcgcgcaccaggtcgaggccgctgacctcttcggagacggtgtgctccacctgcaagcgcgggttgacttccaggaagtacaccttgccgttcggggtcaccatgaattcgcaggtgcccaggcccacgtagccgaccgtggtgaacaggcggcgggagtattcctcgagcgtgctgatgatttcctcggacaggaagggcgcgggtgcctcttccacgagtttctggttgcggcgctgcagcgagcagtcacgggtggagtacacggtgaagttgccgtgcgagtcgcgcccggactgggtctcgacgtggcgtgccttgtccacgaacttctcgatgaagtattccttcagatcgccgccttgcagcgcgtcgtggttcatgtagaagcggcgcagctcctcgtcgtcatgcaccacggtgatgccgtggccgccaccgccatcagtgcgcttcatcatgatcgggtagccgtgggtgtgtgcgaagtcgagcagcgtgcgcacgtcggtcaccggttcggacaggccgggcactggcggcactttggcgcgtagggccacgcggcgggcggtaatcttgtcgcccaaatccaccagcgcggtgtggtgcgggcccacccagatggcaccggcatcctcgaccttctgcgcgaagctcggcacttcggaaaggaatccgtagccggggtgcacggcatccgcaccggtcttgtgcaggatgtcaatcagcagatcttcgttgaggtacgtgtccttgtaggtgtcgccggagagcaggtatgcctcgtcggccatgtccacatagcggctattgcggtcctgttcggagtagacggccacggtggagatacccatctccttggccgtgcgcaccacgcgaagcgcaatctcgcctcggttcgcaatcagcagttttttgacgatagaagccatagtgtcaaattgtgctctctatatagaggagagggcaagccgcgttcacacaaaagctttcacgcccttttgtaggctacgaacaaacgcgcgcgtaggttccggcaacgtaaccgttggcgcctgctatcaaaaacgttgcaaatccgccgattgcacatccttgcgcgccggctcaagaagttgacgttacggttgtgttcgtcaacttatgacaaatcgaaatcgacaattttgtaaattggtacgaaaccgcacgaaatcgaacacctctacgatggcaaccgtaagttcgggggaaggctcatctgcgggcgaacggaaggcgaccggaccggcatcggtccatcgccgcacgattcgcccgcacagggtcggattcatttgggaccgtccaccatatggacggttcggactgtcggggataccgcacgacccgccggaacctcccctcatccatcgcataccgcccgccgttcacggcgatatcacgcaacataggggtcattgatatgcagacttcacacaccaccgcatccgctgcggccaccacatcgctcgcccgtcgtatcgtcgccgcatcctggaagccggtgctgttcgccgtgctgatgtggctgtccgcggccgccggcgagattccgattccgggcacgccggtgccgatcacgctgcaaacgttcgtggtgatgctcgccggtcttatgctgccgtggcgtcaggccggtgccgccgtcgccacctatctggcggccggtgcggtcggcctgccggtgtttgccggcggcacctccacgctggccctggtcggcccgagcgccggcttcctcttcggcttcctgccgggtgtggtggtcatcgccctgctgcgcggcaagtccgacacttcgtccttcgcggccgccgcgcgcaccgcgggccgctacctgctggccgcgctggtcggcggcgtcgtggtggtgtacgccttcggcttcgtcatccagtccgcgctgaccggtgcgccgctcgccgtcgtggccctggtctccatgggcttcgtggttggcgacgccatcaaggccgtggtggcctctctggccgccgccggcctgtccaagctcggtcgctgacctgagctactagctagctactggccggctattacagcactcccacatcggcggtgcggaccgtatggtccgtgccgtcttgtgttctcaggatcagtgaggcgtcttcgttgaggccgatggcttcgccggtcagcgtggtgccgtccgtgaagtgcgcctcgacctgacggccgcgcgcccagcacaccgccttcacctcctcgcgcaacgactcggcctggcccttcgggtcggcgatgaacttcaccaaccgctcgcggaagccctcgacctgacgttcggccaccgcatcgcgcatctcgccgaacgacggcagcccggagacatgcagctgcagcgaggtcgattgcggcgtgggcagccgacaggcgcccaaggccaggttcaggccgacgccgaacacgatgacgacgtcgtcatcggcatcagcatcagtaccggtaccggacgacggcggaatcaccagttccgagagcagcccgcccagcttgagcccgtggcagaacacgtcgttcggccatttgagttccagcgagcagtccggctggttcggcgcggcaccgtattcctcgatcatgccgttcagggcgtccagcgtgaccagtccggcgatcatctgcagccagccattgacggattcgtcggtggcgatcgcgcgcggaatgcgcacggcataggacatcgtcgagcaacggccgggctgactgacccacttgtgaccattgcgcccacggccggcggtctgccggtcggcggccaccacggccaccgccagttcgccatcctggtggtcgggcaacgtcaacgacccgtcgccaatcatctgtacggccagcgcgttggtcgaatcggtttcgcccacggcgaccacatgatctgcgacggctgtagttctgggtagctgcggcgttgcagctttcaacgcaatcatcatgggcactacgttacctcgattttggcgcgatatgcccgcgttattccatggaaaagcgcgcaaaatcaactattttcacccacatagcccatgttaacgttcacaacttcggaaattccgcattcgccgaccccacgcatgcacccggccgtcatattggcttgcgaacaatggcgatgcccggcagacatcgaatatcaaccgttgacctgtgcggctaccatatattgtcatgacgtcaccagccaccgcgaagcttgccgccgtatccagccgccagtcccacccgcatcttgcgcgcgcgggcgctgccgcgcgctggacactggccgtgctggccggcctgtggcttgcactgtgcacggcggtcggcccgctgtactgggatgaggagaacggcaccctcgcccattggaactgggccaataccgcaatattcgtcgtgtcattcctgatatatctcggaatcatcacgctgatggtgcgattcgcagcaggccagcgcatactgccgagggctatcggcgagcgactacgtcaacatcagcggaatagcgaaacatcacggcccgccgccgatcagcaggccagccaaccagccaagacccgtcgtaccgttcgcgctatcgtcacgtccaccgtcactgttctggaccgctggatcacacgcggcacgaaccggttctggaagcttatgctggtgttttttgtcggctggctctgggtgccgaccactctgctggccgcattcggtgcggacctccgctcacagatccgtgaattcagctgggcctggaaccagtggaccggcctgaaacagccctatatcggcttcttctccttcgtgccgatggacatctaccccactgcgcactacatgtggccgtccgatcccacgtatctgaccgaccagcacaatgtggtactcactgtgttctatggcgcgatggtcacgtttgcgaggcatctgaccggctcaaacgatgccggtatcgtgacgttggctgccctgcagacgctgttcgccgtgttctgctgcgctgccgccgccaatcgattcctgaaccggccttggataggaaaaacggcaacggattccgccgctcccccacaggccggaggattggctcgattcctgattctgctgttctttatggtctgcccgctggccgtgttttccactatctccatcaccaaatcgccgctgttcgcgttctcgttcgtctggtggttcagcgtctggtatgaactcgtccagacctggcatcccgccggcacccgcaagcatccgcagacccctgccatcgccacgcccgtccacttgccgcgtcacagtttcatcgcctttatcctggccacgtcggtaatgctgatttccgcgaaatatgcgtggtacatcatcgccctacaaatcgtgctggctctgatcgccgaccgcaagcgctgggcgacttacgtcgtggcgctgctcatccccaccgtactgattcacggcggcatctccttcgccatctcctctggcgcgatcatcggcggcgacccaatcgaaagccgcggcgtacagctgcaaatgatcgcccgcgtggcccagcgcaatccggacggcatttcagacgaagccaaaaagaacctcgcgcccgtcttcaatctcgatcagatggccgacgcttactctcagcaggacgccgacccggtgaaatcctccggcattcaggccaagaaggtcagctacaagtggcgtacggtgacgcccgaggatatgaccaatttcaacaaggcatggttcgaaatcgtcaaggacaatccgatcatcgcgctggatgcgttgctggccaaatgcttcggatacttcaatgtgaacgatcagccgtacgtatcgatggattattacgtgaccagcgattacgtgcagaaaaactccacatggatcaaggattacaaccatgactggcgtgagcacatcgccggcttcactcgcgtatggggcggtattcccgtactcggctggcctacgcacggcaatttctacgtggtgatgacattgctgatcggcgcggccgaggtgattcgccgacgttggctcaccctcatgacccatattccgctgctactgctgatgggcgtgatgattaccgcaccggccaataatttcgagcggcacatgttgccggttgcgtttgtattcggattcgtggtgctgacgtattggcgagagtctttggctgaaaggcaacgccaatcagcgacgctacactagtgactatgtcagattttctcgaacttcttgctgccgacgttgccgattcgtccgcacccggcatcgccgcgaccaaccgcgtacgcaccgtgctgttcgagtgcctgttcaatcatctggccgacgaacgagtggagtccctgttcaccatcctcggcttcgagcatgacttcgattgttacgccatcgccggataccctgcccggtccgccgcacgtacggccaaggaaatcgagaaaatcgtggccgatttcggcggtgtgtgtctgaccgccaagcgcccgatcggcaacagcaccgccgtagtggcgttgattcgtccggtcggtgcggccacgccggaaatcatctgcaataccatcgacccgtcgttcgccgccgatcggccaatcgccttgggtccgcagcgtaccggtgccgatggcgcgatgcgttcgattcaggccacgctctactgtcttcaggccgcgccggctctggccgccaccgtgcagccatcgccgcgcccgttacgcaccgacgacgccctgcccgaacgtgcgttgatcggcgacgcggacgcccgtgacgaactggtccgcgtggtctacggaagcctgacagcagcaggcccggatgatccgacgctgctcaccgtctccacattcctgaagttcggcggttcgctcgagaccacggccaaggagctcaacgtacatcccaatacgatccgctaccgtttgaagcgcgccgccgaatccaccggctgggatgccaccgacccgcgcgaggcgtacgtgctgatcaccgccatcgcgctgggtcgtgtggccgaagcgcagcggaccgcagcgtagtcgggcagaagcataaccagcagaaccgtagccggcaaaggccatagctgaccgggcataaccgtccagcccgacagcctagcgggccgaatcaggctgcctgaatctcgtgtacgccatcgtgcagtaacgcggccaaggattcttgagtggctaacacttcgtccacgaatccaccggcggacaggctggcgatcacgcgaccggactcgttgtccacaatcggtacaccaacggcaccgacacccaacgtcacatcctcatccgacagtgcatatccacgttcgcgagtcaagcgaatatcctcgcgcaactgttccacactgaccagcgtgttctcgttatatgccgggaacggagctcctgcaagatagcgttcggcatcggcatcctcgaaatacgccaaggccacgcggccggccgcgccagcatgcagaggcagcacgcggcccgggcgcaggatcagcgaatcgatggcatgaccttgcgcgcattccacgcataccaattcagtgccggagaccacactgaggaatgatgtcatgccggtttgcgcggtgatggcatgcatgaccgcaatcgcaggctgccattcggtacgagacgtgcgagcggcatcagccaatcgcagccagtccagtgataatgagtagttgccatctgtatccgttacggcccaccccacatcgaccagtccatccagcacgcggtatacggaggatcgcgggatatcacaggcgtcggcgatatctgccggagacaggccattctccgccgccaatgcgtccatcacacgactcgccttgtctaaagcgcgggtcggttcacgtttgtcttccgccatcgccgacgttccttccccctgacttatccctgactcatcgtattcaactgctcaggccaagataatcaccgctgtatccaaggcctcgcgacacctcgcggccggcagtctgcaccaattgcaccatgtcttgagccgatgccgttgccggtttcccatctaccagacaggccagctcaggttccaaggagcgggaaaggccactcagggcgattgccgcctgaatctctccggcgtgattgaataccggtacgctgatagtcacggagccggccatggtctggccgacatcataggtgaagccgcattcacgtatatgacgagcctgtcccattgctgtggcacgcatcgtggagaatgtgccgccgagctcgttgttataggcatagtgttccaacagatgctcgtagcgagccgggggaagccaggccgtcagtacatgagagggagcgctcatgctcagaggcaagctattgcccaccagctgtgcatagctttgcaatgcctcacgggtgcgtgtctcgatacacaccgtgcgcaatcgcctccgaacgaacagaccccagatgccgaactggccacgatgggcgcggaaggtacggcgagcgatctgctgaatgtccagtctgctttcgatttggccgccgatacgtacgcaatcgatgccaagccgatactcgccacgattgatgccgcgttccacccaaccgactgcggcgagattatccagcaaacgatacgttgagcttacgggttcaccagtacgttcgcttatggtttttgcagtgcttggtcccagttccgccaatacatcaagtactgccttggatttcaccaatgcatctacgctacggtcatcacggcttggcgccaccatgcgcgtcacctcctgacctgtttgttgatacctcagccatcttaccgggtattcagcgggttgccgcccaaaacgcactgggccccggcaggagtatcccgtcggggcccaagaggtttctggctcccttctttgagggggagccgtccgcgcggcggaccgggggaggcccgagacgctaaggcccaaggacgcgagaaacaccccgacgcgcgggtgtcctgatatggggaaagccccttggggcgtgtgctccaaggggcttcctgtacgtgtggtgcggcggcgtgctactctcccacaccctgtcgggtgcagtaccatcgccgtgccaggccttagcttccgggttcggaatgggaccgggcgtctcacctgggccatggccgccgcaaatcttctcttatacggtcagacgctggggtctgccggcctgtggcggcctgggaaccggacagcggacgcggatatgtcgatgtttcgtcttgtggccagacaatgctcattgccgtctggtgccgtttgcaggaggaagatgcggtccaaccgccaggggctggaatgttagtgttgcctttcgtccgttagtaccggtcggctccacccctcgcggggcttccacgtccggcctatcgaccacgtgttctgcatggggactacaggaactcgaaggttccacggaatgcttatcttggagcaggcttcccgcttagatgctttcagcggttatcccttccgaacgtagccaaccggccgtgccactggcgtgacaaccggcataccagaggttcgtccacccaggtcctctcgtactatgggcaggcctcctcagcattccaacgagcgcagaggatagagaccaaactgtctcacgacgttctgaacccagctcgcgtgccgctttaatcggcgaacagccgaacccttgggacctgctccagccccaggatgcgacgagccgacatcgaggtgccaaaccatcccgtcgatatggactcttgggaatgatcagcctgttatccccggggtaccttttatccgttgagcgatgccgcgtccgtacaccggcaccggatcactagtcccgactttcgtccctgctcggaccgtcgtcctcgcagtcaagcccgcttgtgcacttgcactcgccacccgattgccaaccgggctgagcggacctttgggcgcctccgttactctttgggaggcaaccgccccagttaaactacccgccaggcactgtccctgaacaggatgactgttcgaggttagacatccaatgcgaacagagcggtatttcaccttacggctccgcgcgatctggcgaccgcgcctctcggcctcccgcctatgctacacaatccacaccgaatgccaataccaaggtatagtaaaggtcccggggtcttttcgtccttctgcgcttaacgagcatctttactcgtactgcaatttcgccgagctcctggtcgagacagtggggaagtcgttacgccattcgtgcaggtcggaacttacccgacaaggaatttcgctaccttaggatggttatagttaccaccgccgtttaccggggcttgaattcaccgcttcacccgaaggctgacggatcctcttaaccttccggcaccgggcaggcgtcagtgcatatacagcggcttgcgccttcgcatgcacctgtgtttttggtaaacagtcgctaccccctggtctgtgccacccccaaaagctccccgcgcgaggcggttcaccatcgggggtctcccttaaaccgaaggaacgggagtgatttgccgagttccttgaccaggattcgctcgatcgctttggtattctctacctgaccaccagtgtcggtttggggtacgggcggcttcgagcctgacgccgaagcttttctcggcagccgggatcaccggatatcgggccataaggcccccatcatcgcacctcggacccatgcgggacggatttgcctgtcccacgccctgcgtgcttgaccacggaagaccacctccgcggccggctacccttctgcgtcactcctgcgctgacctactacaaggatcggtcccaacaggccagggcatcccgcccccgaaggagcagtaagcccggacccggaggttagtactccaagcctcggttttggcggctgaaagccggtacgggaatatcgacccgttcatccattcgactacgcctgtcggcctcgccttaggacccgactcacccagggacgatgaacgtggccctggaacccttggtcatccagcggacgggatcttcacccgtctctcgctactcatgtctgcattctcactcccatgaagtccacggcgcgttcacacggccgcttcgcccctcatgggacgctctcctacccagtacaaaatactgccgcgtcttcggtggtgtgcttgagccccgctacattgtcggcgcggaaccactagaccagtgagctgttacgcactctttcaagggtggctgcttctgagccaacctcctggctgtctatgcgactccacatcctttcccacttagcacacgcttcgggaccttagacgacggtctgggctgtttccctttcgacgacgaagcttatcccccgccgactcactgccgggatacgcgtcaccggtattcggagtttggttgctgttggtacccgatacgggcccgcaagcatccagtagctctacccccgggacgtaatgacccgacgctgcacccaaatgcatttcggagagaaccagctatcacggaatttgattggcctttcacccctagccccaagtcatccccccggttttcaacccaggtgggttcggtcctccacgcggtcttacccgcgcttcaacctgctcagggctagatcatcccgcttcgggtccaggacacgcgactcaaacgccttttaagactcgccttcgctacgcataccccacacgggttatgctcgccacatgccactgactcgcagactcatttttcgataggcacgccgtcaccccacaaaagggctccgacggattgtaggcgcacggtttcagagactgtttcactcccctcccggggtacttttcacctttccctcacggtactcgttcgctatcggtcagacaggaatattcaggcttacccaacggtctgggcggattcgcacggggttccacgggacccgtgctacttgggagacgcgatcggcagaccatgcgcgttcaggtacggggccctcaccctctgcggcccggtattcaacccggttcccctgacacatggttttctgcaactgccggccggcccgtcggagccggcgcacgcgatcccgcaacaccccgcgcgcaacccccgacgggtatcacacgcgcaaggtttggccatcatccgctttcgctcgccactactcacggaatatcctttcctgcaggtactgagatgtttcacttccctgcgtaccccccggccgaagccggtaccgacccatgacggtcggtgggttcccccattcggaaatcctcggatcaaagccctgttggcggctccccgaggcatatcgcagcctcaaacgtccttcatcggtcctgtctgccaaggcatccaccatacgcccttgcaagcaacacacaccacgaaagtgcatggccgcaagattcctctagcaaattcccagacgacaaatcatcacactaaaaatgatcacaaaacgatcgaaacgaacaatagagttcgattcgaaatcaacagcaaaacaaagattcaaaaacccttgttttgctcgcgtccactatccagttctcaagccaccacgcaccgccacgccatcgcgccggcacacggccggcccccaggcacgacgggcatcgaatcgcgccaggcaaaaagcctggggtggcgatccgggagcccaaaagcgcatccgcaccaccccggcacccaccgcacgaccggcggggcaaagccaacgacgtcttccacaccagcaaccccgccgccatcgcaccatgcgacgcgcggggcgcacaccgtcggacgaacatccgactgaattctccgtagaaaggaggtgatccagccgcaccttccggtacggctaccttgttacgacttagtcccaatcacgagcctcaccttagacggctccatcccacaaggggttaggccaccggcttcgggtgctgcccactttcatgacttgacgggcggtgtgtacaaggcccgggaacgcattcaccgcgacgttgctgattcgcgattactagcgactccgccttcacgcagtcgagttgcagactgcgatccgaactgagaccggttttcagggatccgctccgcgtcgccgcgtcgcatcccgttgtaccggccattgtagcatgcgtgaagccctggacgtaaggggcatgatgatctgacgtcatccccaccttcctccgagttaaccccggcggtcccccgtgagttcccggcataatccgctggcaacacggggcgagggttgcgctcgttgcgggacttaacccaacatctcacgacacgagctgacgacgaccatgcaccacctgtgaacccgccccgaagggaagccgcatctctacgaccgtcgggaacatgtcaagcccaggtaaggttcttcgcgttgcatcgaattaatccgcatgctccgccgcttgtgcgggcccccgtcaatttctttgagttttagccttgcggccgtactccccaggcgggatgcttaacgcgttagctccgacacggaacccgtggaacgggccccacatccagcatccaccgtttacggcgtggactaccagggtatctaatcctgttcgctccccacgctttcgctcctcagcgtcagtaacggcccagagacctgccttcgccattggtgttcttcccgatatctacacattccaccgttacaccgggaattccagtctcccctaccgcactcaagcccgcccgtacccggcgcggatccaccgttaagcgatggactttcacaccggacgcgacgaaccgcctacgagccctttacgcccaataattccggataacgcttgcaccctacgtattaccgcggctgctggcacgtagttagccggtgcttattcaacgggtaaactcactctcgcttgctccccgataaaagaggtttacaacccgaaggcctccatccctcacgcggcgtcgctgcatcaggcttgcgcccattgtgcaatattccccactgctgcctcccgtaggagtctgggccgtatctcagtcccaatgtggccggtcgccctctcaggccggctacccgtcgaagccacggtgggccgttaccccgccgtcaagctgataggacgcgaccccatcccataccgcgaaagctttcccagaagaccatgcgatcaactggagcatccggcattaccacccgtttccaggagctattccggtgtatggggcaggtcggtcacgcattactcacccgttcgccactctcaccaccaggcaaagcccggtggatcccgttcgacttgcatgtgttaagcacgccgccagcgttcatcctgagccagaatcgaaccctccacaaaaaaacttcatgaaaagcatccgaatagatgactctcaaaacaaaaattgacgagcacgtccttaaggaaggacgccctcaaaaaacctcacccctcatcaaaccctcccgggtacccaaccaccacgacaagcaatcaggcgaggaatgaactggcaatcattgactataaagaagtagtacaaacacgctcttgagttctcaaaccaccaccacaccagcaagacaggaaaccaaccagaggaaggaacccgccgcgctgagcggcaacaggtgaataacttacacgcatgtccggattcacgcaaatcaaggcgcacaaaaacccaaggaatcgttgcaatcacacggttccctcggcgtgtcgcaaacagcctatttgcgctgttctgatatcagaataatccgttttgcattgccgatgcgtaacaaattcatgtgttcaacggcgtgtcgcaagaattcgattgcgtgaccatccaggttcaccttctcgcaaccggtcatcgcatatgcaaaaagggacttccctttacgggaagtccctttcagtagctattgaagctcgctagcctcaggccagggtgttcgggtcaaccggaacgcccgggttcatcgtggaggtgatggttgccttggtcaggtaacggcccttcacggtggacggcttcagacgcttgacttcgtcggccacagccttgaagttctcgtccagagcggactcatcgaagctcatcttgccgatgaggaagctcaggttgccgttcttgtcgacacggaactcgatcttgccgcccttgatgtccttgacagccttggtgacgtccatggtcacggtgccggtcttggggttcggcatcaggccacgcggaccgagcacacggcccagacggccgaccttgcccatcatgtccggagtagcaaccacggcgtcgaagtcgaggaagccgccctgaacctttgcgatcaggtcgtcatcaccgacgatgtcggcgccagcctcggtagcctcggtggccttcgggccacgggcgaacacgaggaccttggcggtcttaccagtgccgtgaggcaggttgacggtaccacgcacgagctggtcggccttacgcgggtcaacgctcagacggaacacagcctcgacggtctggtcgaagttgtaggagggcatgctcttgagcagagcgatggcctcgttggcggtgtagaggttgttgcgatcgacgcgctcagcggcttcgcggtacttcttggaacgctttaccatctgtccttctccttatcagtccgtaaccgtgatgcccatcgagcgagcggtgccctcgatgatcttcatgccggcctcgatatcgcgagcagacagatcttccatcttgatctcggcgatttcgcgaacctgcgccttggtgacagagccgaccttgtgggtcagcgggttctcggtgcccttctcaacgccagcggccttcttcagcagagctgcagccggcggggtcttgagcacgaaggtgaaggaacgatcttcgtaaacggtgatctcgacagggatgacctgacccatcttgtcctgcgtctgggcattgtatgccttgcagaagtccatgatgttcacgccatgcgaacccagagccgggcccagcggcggggccgggttggccttgccagcctggatctggagcttaatcagcgccgagactttcttcttgggagccatattatggttcttctttctataacgcggttcgaatggtcgccgtcctcaggttcggctgtctgccatcatgctcggtcttgactcattatttatccgtgcatgctgtaggcaatcggcctgtggtcggtctcctcccgcaacttatattgctgtgctgtgctagcgagtctcctctccagacacaagctttcctattatgcaaatccacccggacaacacaaaaagcccgaccacgatggtcgggctctgcaaagtttgggagttaatctagcttctgaacctggtggaagccaagctccaccggcgtatcacggccgaagatggacacgagcacggtgagcttctgagtggtgggctccacgtcggaaacaacggcggccatggtggcgaaaggcccatcggtgacggtgacctgatcgccaacggcgtaggagacctcgaccctgcgcttcttggcggcggcgggcttgtcgccggcggccttgagtgcctcggaagcaatcatcggagccatcatcgccacgacttccttgcgggagagcggcgccggatccttggtcgggccaacgaagccggtcacgccttcggtctcacgaacgatacggcgggcgttctcatccggccacatacgaatcagcacgtagccaggaacacgcacgcgggtgatgaccttcttgcccttctcggtgtgcttctcgacttcttccatcggcacctcgacctggaagatctggtcttccatgccgaaggaggcgacgcgggactcgatgttggtcttcacgcgcttctcgtagccggagtaggtgtgcagcacgtaccacttgccatcaagggaacgcagggacttggagaattcgtcaacggcctgctgaccggcatcggtctcctcggcctgctcggattcgttgacttcttcctcgtcctcatccagagaaacggtctcggtctgagtggaagcaacgggagcggattcagtcgccgccggagcgtcggactcaacatctgcattgtcgacggatgcgtcagattctgcggaaaggtcagcgaccggttcgaccggggcagctgcctcatcggcagcagcttcggaagcctcgacaacaggctcctcagccgggacggcgtcgaggttctcgagattcagttcatcactcatgcgttgttattcaccttaggttgtgcggatcagccgaacacccacagcgtggccttgcctagaccgaagtccatgccagtcacgagggccatcagcagcagcacgaagatgaatacggccagagaccagaagaacagttccttggcggtaggggtcacgaccttgcgaagctcgtcgatgatctgcttgatgaacagaccgatacgcatgaagacattcggcttgactgccttttcactcttgctcgtcttagccattccgtacctcgcgtcagctgcttgattattagaaacttggcagggaaggcgggactcgaacccacaacctacggttttggagaccgttgcgctaccaattgcgccacttccctaggtgaaaatccacctcggcgtgcgttccgtagagaacgcttcgccacggcgaaaccgccaagtcgttatagtaacggctccggtggattatcgcaaatcgcgtgtcgcgcgcgtagcacgcgactcttctcagttagcccattccttgaatcgacgcatgccttcggctaggtcttcgtcggccagtgcgtaggagaaacgcaggtaaccgggagcaccaaaggcctcgccggggacggcggccacgtgggcctcatccaacagtgcagcggcaaagtcagcggacgtatcggacactgtgcccttgggacccagcggcttgccaagcaaagcggtgatgtccgcaaaaacgtagaacgcgccggtcggagtcgggcagttgacgccctcgatatcgttcaaggcggtcacaatcgcacggcggcgcgcgtcgaaggccttacgcatctcgtgcacctcatccagcgggccggccacagcagccaaagcagcacgctgggagatgttggccacattggaggtcatatgaccctgcagcttggcggcggccttggccacctcaagcggagcgaccatccagccgacacgccagcccggcatcgcataggtcttggccacgccgttcagcaccagcaactgcccgcggcattccggcacggcggcaccgatgtaggtggtgtgcgcatcgtcatagttcaggtgctcgtagatctcgtcggagataacccaaatgtggtgctcgacggcccaacgaccgatcgcttccacggtttccggcttccagacggctccggtcgggttgttcggggagttgacgatgattgccttcgtatgctcggtacgggccgcttccagcgcctcaagcgagggctcgaagttcacgtcggcaccggcgaatacttcgaccggcacaccaccggcaagcttcacagcctcggggtagctggtccagtacggagcgggaatgatgacctcatcgccatcgttgagcaagatctggaaggattcatacacggcctgcttgccgccgttggtcaccacgacctgatcggcattgacctcatagccggaatcgcgcagcatcttagccgcaatcgcttcgcgcagctcgggcaggcccggcgtaggcgtgtacttgtaattcttcgggtcaaggcaggcatctgccgcagccttgaccacgtttgcgggggtcgggaaattcggttcacctgcgccgaagccgacaacgtcaagtccggcggccttcatggccttggccttggaatcgacggcgagcgtagcgctcggtgccacagtgttgatacggtcggaaagagtctgccattgcgccatagtcatggctcccatgctaaacctacagcacgaaaaatcgccagagccgcactatggtgatggaatctgtcgtgtgacagattccatcagtcacacgagcacgagattgtcgcgatgaaccagtgggtgggcgtactgggggccgaggaaacgcttgagttgggcggtgttacgcccgagcatctgcggaatttcttcggaatcgaagccggcgaggcctcgggccaggtgttcaccgctttcggcatcgatccagaccggatcgccggcggaaaaatcgccatgtacttcgagcgcgccggccgccagcagcgaggcacgcccgccgcgaatcgcctggccggcacccgcatcgaccacaatcgtgccgcgcgggtcggcggcgaagccgatccacagacggcgtgaggagccgcgggccttaaccggtgcgaacacggtgcccaccggatcgcccatcatcgcagggcccgcgttcgaggcgcaggtgagtaccgtggggatgcccgagacggccgccacgcgcgcggcctcgagtttggtgaccatgccgccggtgccgaccttggagccggagccggagacttggatgtcgcccagcgcatcaatcacgttgggcacatattccacacggcgggagccgggctgcgagggcggcgcagtgtacagcgcgtccacgtcggtcagtagcaccaaggcttcggcccgcaccaggttggccaccaacgcggagagtcgatcgttgtcgccgaagcgaatctcgttcgaggccaacgaatcgttttcgttgatgatcggcaccacgccgaggtcaagcagacggtccagcgtgcgttccacattgcggtactgggtggcacgaatcgtatcttcggcagtgatcagaatctggccgacgcgaataccgaatcgaccgaacgcagtctcgtagcgggccatcagtagcccttggccgacggctgcggtggcctgctgagtggccacgtccaccggccgcgagtcaaagcccagaggcccgaaaccggcggcgatagcaccggacgagaccagcaccacacgtccgcccatcaatcggacctgagccaaggccgcggccaacgcgtcgagcttgtccgggtcgaggtgaccgctcggctgggtcagcgagctggagccgactttcacgacaatggttccggctgcggcgatcatgcgccgcacctcggcctgactcggagtgctcatttattcctcggtttcaccatcttcgctggactcaccgtggccgaacaggctggtttcgtcatggcgatcgtcgtcaacggtcgggtcggcccagtggccggccttgcgttcggccatcatcgcgtcgcgcacggcggcacgggcgtccatcatctcgtggtattgggcacgacgttcggcgttggagcggcggtgcgtgcgcgggtccagctcttcgagacgcagatccttgcctcgggcaccgaggttggagccgtcgagcatttcggcaccagcggagatggtcggatcccaatcgaattcgaccatacgggcaccacgaccgatgcgcacttcgtcgccggggtgagcacccttgcggcgcagctcgtcctccacgcccagcttggccaagcggtcagccaggtagcccacagcctcgtcgttgtcgaagttggtctgcatgacccagcgctccggcttgacgccacgcacctcgaagaacacttcgccattgccgagttcgcggcgctcgaccgtgaactcaagcgcactgccgccctcgtcagcacgacgcggacggcggcccttggtctccaatggcttgatgaccacgcgagcctcctcttcggcctgctcgcggttggccacttcctcacgcatctcgtgcaccagcgcagacaacgcgaagttgagctcctttagaccctcgtgcgaggcagtggagatctcaaagaccttcagcccgagtttctcgaactccggacgcacgaactcagccaattccttggcctcgggcacatcgatcttgttcagaatcacgatgcgcgggcgttcgggaatcgggatggcacccaacggcagctcgagcttgtcggcgtagagcgccaactcgttttccagcgcgtggtagtcggacatcgggtcgcggtccggttcaagcgtggcgcaatcgatcacatgggcgatgatttcggtacgttcgatgtggcgcaggaactccagtcccaggcccttgccttcggaggcgcccggaatcaggcccggcacgtcggcgatggtgtatcgagagtcgccggcgataacgacgccgagattcggcaccagcgtggtgaacgggtagtcggcgatcttcggcttggcggaactcatcgccgcaatcagggacgactttccggccgaggggaaaccgaccaacgccacgtcggcgatggacttcaattccaaaatcacgtcgcgctcttcaccgagttcgccgagcagggcgaagccgggggcgcggcgggtcttgttagccagggcgatgttgccgaggccgccggcaccgccttgggcgacgacgcagcggtcgccctcgtggcgcaggtcggcgagctgcgcgccgggatgcttggctttgccctgttcgccgcgcgcctcaaagacgacggtgccgcagggcacgggcagaatcaggtcctcgcccttggagccgtccttattgtcgcccaaacccatggtgccgctgccggcgacacgatgcggcatgaaacgatagtcgagcaggctggtggcgttacggtcggccacgaacaccacggaaccaccgtcgccgccattgccaccgttcgggccggccaacggcttgtatttctcacgacggatgccggccgaaccgttgcccccatcgccgcccttgacatggacggttactcgatccacaaaatcactcatattgattaccttacaaaaaagccgcgtccttacgggcgcggcttgaaaaaagcttgacgctatatcgctcaggcgatgacgtcgacaaccttgcggtcgcgacgcacaccgaacttcacggagccatcggtgagggcgaacagcgtgtgatccttgcccatgccgacgttgtggcccgggtggaagttggtgccacgctggcgaacgatgatgttgccggccacgacggcttcgccgccgaacttcttcacgccgaggtattgcgggttagaatcgcgaccgttgcgagagctggacgcacccttcttatgtgccatgattcatggtcctttctataactcaggcaatcgccgtgatcttgacgatagtcagcttctggcgatgacccttacggcgagcaacaccagtcttgttcttgtacttctggatgctaatcttcgggcccttggcttcgtcgttcacaacctcagccttgacggacaccttggccagatcggcggcggcaagggtgaccttgtcaccatcgacaacgagggagaccgggaattccacggtatcgcccttcttagcgtcgagacggttcacgaggatgacgtcgccaacctcgaccttttcctgatggccaccggccttcacaatcgcgtacattatcgttccttttatgttttggaaagctaccttgcctaacacgcaccgagcttgcggtcagacaccgagtttcgaatctacaccaccatgcggactaaatcaaatgatttttgcccgcgtgtcaagcacgacacacctgttactcttccgcttactcttccgccgtgttgttggcagcgacggcagcggcggcaatctgagccagtttggctttgacgtcggcgctggaaccagccggttcgggagcgggagcggtgccgcgaccgtgcttgttggttttgacgaacgggtcgccaccgcgaagcgcgtagggatcgtcgtagtcggccgaaacggtcggctgatcatgcaggatgaaaccacggcccttgcaggtcgggcattcctcggagaacgcctcgaccagaccctggccgatgcgcttgcgggtcatctgcaccaaaccgagcgaggtgacttcggccacctgatgcttggtgcggtcgcgtgccaagcattcgaccaagcggcgcagcaccagatcgcggttggcgggcatgaccatatccacatagtcgatcatcaccatgccaccgatatcgcgcaggcgcagctggcgggcgatctcttcagacgcctccaggttgcaacgcgtcaccgtttcttccaaggacttgcccttgccgataaagcggccggtgttcacgtcaatggtggtcatggcttcggtgcgatcgatgacaatcgagccgccggacggcaggtagacctgacgctccatgcccttacgcagctgggagtcgatggaccacttgtcgaacacgtccttgccttcatgctcggccgggtcccacttctccagcttgtccttcaagtcgggggccatggtgtcaaggtattcctcgatacggtcgtagaccttgtcaccttccacgatgagcttgctgaagtcgtcgttgaagatgtcgcgcaccacgcggatggccacgtcgggctcgccctgcaggagcttcgggcgcttgccgtgccagaattcctcgcgcttggcgttgatgcgctcccactggcggaccagtgattcgagatccttgacgatggcgtcttcggatgcgccctcggctgcggtacggatgatcacgcccatgtctttcggggcgatcttggagacgatgttcttcagacggctgcgttcgcgctccgaaagcttgcggctcacgccggtcatgccgccggatggcacgagcaccaggaagcggccggcgagcgtgacctgagaggtcaggcgggcacccttgtggccgatcgggtccttagtgacctgcacgagcaccgggtcgccggacttgaacgccagctcgatgcggcgcggctggccttcgagacgagcggcatcccagttgacctcgccggcgtaaagcacgccgttgcgggcctggccgatgtccacaaatgcggcctccatgctgggcagcacgttctgcacgcggccaaggtagatgttgccgacggtctgtacttcctgaatgtcggagacgtaatgttcgaccagaacattgtcttccaccacggaaatctgggtgtgatgttccttctcacgcaccaccatcaggcggtccacgttctcgcggcgtgcgaggaagtcctgttccatgagctggctctggcggctgcgctcacggcggttgtcacggcggcgctgcttcttggcctcgagacgagtggagccctccacatcagtgatctcgtcgatgtactgctgcttgcgggagcggcggaccagcggctgttcgctgttctgactctggtcgtcggtgccctcgccgttcttgccgccacggcggcgacggcgacggcgagtaacggtctgctcctcatcgtcctcatcgcgatcacggtcatgatcatcgcgatcgtcacgacggcgggaacgcgtatcttcggcatcgttctcggcggtatcgtgctcgccgttggcaccggtttcgccgcgtgagccgcgacggcggcgacggcgcgaacgggtgcgggtggcgtcggattcttcgtcgccctcctcttcggcaatcggcgagtaggcgatatcgtccagctcgaggtcttcctcaatctgctcgacttcggcggctgcacggcgctcctgggcgttcaggcggcgggagcgacgggaacggcgagagtcggaagcgtcatcggaatcgaaatcatcatggtccgtgttggcgctggcattggcgtcaccggcggcagcgttgcgggaagcgtcacgagacgcatcacggtcggcggcattgcggccacgatcgtcacggtcgtcacggcggcggctgcgcggctgcgcgtcgtcatcatcgtggctgcgcgagcggcgggagcgacgcgacggacgttcgtcgtcgtcaacatcgtcatcacgagtgtcagcggtatcgtgcgcatccacagcggcgggcagtaccggttcctggaagagcagggacgtcatcggcttgccgcgacgcacggcctcgtggccagagggcagggattcgaccgcgtcgaacaggcgctcatccggggtgtcctcgtgcgtatccgcaactgcacggcgagaacgacggcgaaccggacggtcctcgtcatcatcatccatatccatagacgcacggcgagagcgggagcgaaccggccgatcctcgtagtcatcatcgtcggactggcgggagcgagagcggcggcgaaccgggcggtcctcgtcgtaatcgtcatcgtccacaaccgaacggcggcgggaacgtggggcgtcatcgtcatcgaaatcatcggcactgacagtgcggcgcgaacgacgaggacgatcatcctcgctatccgagtcggccactgcggaagcggcgcggcgcgaacggcggcgggttggacgttcggcggaatcctgggaatcgctggattcatcggaatcgctggaatcggctgacttggaatcggccgcagtgccggcatcgggaagcgcgggggcttcgaacagcggggcgcgttcctgcacttgcagttccagggaagcgccggcagcaccggtgccgcggaccacgcgacggccgccacgacgacggcgaacaggttcggcgggctgggaggcggcggcaggcgcagcgttcacggctgcagccgaatcggcattggatacggttgaattatcggttccgtcgttgacgaaaccttcacggttgtcagtgggcacaatgctcctcgcggcgcgctgcatcacgacgcctatttccaggcctatacgcttgtctcacaccacgctctcaccgtggccgcgcgaaaacgcgccgcgtaaaggcaacttcgtctcaagtctgtcctgcgggtggcggacaccggcgcttgcgttgtctcattctcaagagccgcaaggggatcgacgccatctcgcacgctgatggttatgcagaaccaccatcctttagtatgccacatattttgtgcgggcgtggcccggcgaggctgacgttctctcggctcccctcccccgcggtgacagctcccctcagggaggggagctagagaggtgtcagaccagccagtcggtaaggattgcggccatggcggtcagatcggattcgggcacctgctcgtcgtgcttgtgagccagcagcggatcgccggcaccgaggttgacggccgggataccgagctgagagaagcgtgccacgtcggtccagccgagcttggccagcgggtcgcggccagtgcgctccttaaccagtcggaccagatcctgggcaagcggggcgttcaggcccgggcgcgcggaggggctttcgtccttcattacgatgccgtagccctcgaacacgccgccagtggccacatgctcgccattgccgagttcggcaccggcgtccgcgcccatcatcagagccttggcctcggccagcgacttgtccggggcgaagcggtagttgacgtgcacgcggcattcatccggaatgacgttcgtgcctttgccgccggagatcagcgtggcgttgaggccctcgcgatagtcgagcccgtccacgttcacggtggccggctcgtaggcgttgagtcggttcaggatgtcggccgccttgtggatggcgttctcccccatccatgcacgggcggaatgcgcggccacgccgtgggtcacgacgtcgaagcgaatcgtgccgttgcagccgccctcgatgccgctgttggtgggctcgccgatgatggcgaaatcgccggtgatccaatcgggatgggcctcgacgactttgcgtaggccattcttttcggcgacgacttcctcatggtcgtagaagacgtaggtgaggtcgactttcggggtggtttccggcgtgcggccgtcgagcgtggcggcgaggtagagcatcaccgcgtcggaggccttcatatcggtggcaccgcggccccacagcacgcggtcttcgggatgagcgtgggcgatttcttcgcgaatcagcgaatcgccgggctccagccactttggtgggaaattgtcgatgaccggcacagtatcgaggtgcccagccaagatcacacggctcggcttgccgaagtcggtgctggccaccactgtgtcgccgtgacggcggacggtcaggtgctcttgctcgttaaggaaggcctcgacctcgtcggtgagggggccctcgtggtcggacacggagaagttctccatgatctgggtgagcaggctgttcagctgctcggcagtggatgcggtgcggttcaattcaagcgtcatgtgaacagcgtaccgcgtgggcggcgggcccagcacactcactacatgagattttgcggccgaatacatttttatgtgccacactggggtggcgaaagggaggattatgccaggtctaatcagcgccatgcaaggcttctgcgttatcggcatcgtaatcgcggtgggatatgttgccgcacgaatgcgaatcggcgggccgtccgctcagatggtgctcaaccggttctccttcttcgtatcgagcccgtgcctgatgttcgcgattctctccaaggagccgattttcgacatcttccacccctcgattatcgtggcgttcttctccgccgtgctggtgggcgtggtgtttttggtgctcaaccgtatgttcttccacctgaatgccccggacgccaccatcggtgccctgaattcgctgtacctcaattccaataacatcggcctgccaatcgccacctacattctgggcaatccggctcttgtggcaccgattctggtcatgcagcaggccatcttcacaccggtgggcctgacagtgctggacgtgaccaccaagggcaaggtctccatcaaggaaatcgccaagcagccactgcatcagccgctgcttatcggctcgctgctgggcattgtggtctctgcgatttccgctaaaagcggctggttcccagtgccgaaattcattttcgacccgatcgacatgatcggcgattcggctgtgccaatgatcctgatggcgttcggcatgtccctgcacggcaccaagccgctgcagcagaagggcgatcgcccggccatcctcacggtcgcggtcctcaagaacatcatcatgccaattatcgcgttcctgctcgcctacttcgtgatgggcttccgcggctccgagctgtacgcctgcgtggtactcgccgctctgcccaccggccagaacgtatacaactacgcggcccgctacaacgtgggtctcaccttcgcgcgcgacggcattctgatgagcaccatgaccagcccggtgtttatcgcgatcatcgcggcgctgctgtcgtgatgggtgcgcagagaagcgttctcaatagtatccgtgcgcgcaaatgcacagatatcgcacaaacgaacatttgctcatccgcatatttgcggtgatttcagcgtttccacgttcgatttgcgtatacgaaagtacgcacagttgttattgagaacgattcgctgcgcagctcggctcagtcatcagcccgataatcggtcagattcaagctggccgccacatgattggacgcgaacgcgccgatggaaaccagcgcatagcacaacacaagcccgccgaagaagctggccagcgtggccggttcggtcatcgaagcggcgaacagaggggccataagcagcatggaacagccgccggccacgatcaccacgatgttgagcggggtgagtacctcgatgaatcgcgcacggttcaaggtcttgacatcagtgccctccaacaccagcatgcgatattcgccggcctgatcgtacacgctgccggcctgcatcacaccggagctgaccgcggcaagcacagcggcgaacacgagcgtcagaatgccgccggtgccgatgtcgcgaatgaacacggtgaacgggtcgttggcgtcatcgaccacggcggccgatccgaagaatccgcagatcgacgtgatgccggcgataaacacggccaacgcaatgccggacacattgcgccaggcgcgcttagggttgtcgagaatacggcgcatggcaatcatcgtggccgcatccttggggcgcttggccttggccttggcgcgagcggtgatcacccacgtgccgataagattcaccagcgcgaagcacagcagcatgaaaccgatgatcacgccgtacatcaccgcctggccggcctgagccagcatggccgggttcttgaagacgatcatggccaccaccacgactaccacgaacagcaccatacgggtgcctgagggcaatgcggtggcggtgcgcgaggtgacacccaatggggtgattgccacgcggcgcaaggtgaccagcgacgatatcagcgccaagatggccacgcccgccaaggtgattaccagcgccagcgggccgacccatagctgttcgaaggtgaaccgctgctcctggaagggaatcagcatgactgccggcatcagggcgcaatagccggcaatgccgataagcgcgccgatcagcgcctgtccggcggcgtcaagcgcggtgagacgcaccacctgaccggtggtcgcgccggccagacgcagggcggcgagacgggcgtcgcggcgggatgcggccagtcgtgcggcggaaccggcgagcgccacgaacggcacgacgagcagcatgcaggcgaataccgccaacaccacataggcggtggagaattgggccaagctcgtcgggtcgctgatctgccgtttccacgcggccaccgtatcgggccggcaggcaccgaggtcgaacgcgcaggcgacggtatgatcggccgaagcccgccagatgaaaccgtgtacgccgccgagcacggtgaggaagatggtggtggctgcggtgaaggcgatgattgccagcatcgaggtgtggccggcgctgccgcgcgagccggggcggtgaaacagccgccagagggcgaacgtgctcattgcgcgcctcctgcggtggtttcgctcccgccggctggagctgccgagcgtagcgaggctgagggtggttcagcgccctcgggccacccccagtcagcctgcggctgacagcccccgccggcgggagcggagttggggttggcgcctgtctggtgcagacggccgtcctgcatcattacggtacggccgcagaacgaagcgacgttggggtcgtgggtgacgacgaccacggcggaaccgttgtcccgcgcggcggccatgagaatgcccatgacctcgcggccggtggcttggtcgagcgcgccggtcggctcgtcggcgaagaccacggcaggtttgacgacgagtgcacgggcgatggcaatgcgctgcatctgtccgccgctcatctcccccggccggtgcgtggcgagcgcgcgcaatcccatgcgttccagccacaggatcgccgtgtcggtggcggtgcggtagggcatgccgtcaagcatcatcggcagggcgatgttttcgaccgccggcagttcgggcagcagctggccggactggaagacgaagccgaagtcgttgcggcgcagtttggtgcgctcggcgtcgctcatgcggctcaggtcggcaccacggaagatgacggtgccggcggtcggcttaatgatgccggcgagcgcgtgcagcaaagtggatttgccggagccggacgggcccatcacggctaccgtctcgccctcccggagcgtgaagttcacgtggttcagggcgagcgtgtgcatggtcggcatggcgaagccgggctgggctggctgggatggctggccggcctgaatggcacccggtccggccgcagcgggattcgccgacgcataaccggctcccgtgccggctggtatcacgccggtgacgccgtgcccggcctgtgcgcgggccatgctggcggtgtagtccatgaccaggtcatgggcctcgatgaccggggcccactgctgggtgtgcgatgccggctgctggaactgttggggttgctgagactgctgaggctgagccgccggtcccggcgccggctgaggctgctgcaattgcgatgctgctgtattcatactcccgagcgtacggagcgaacacccagccgaccatcgggctacggtatgaacctttctggattaccggcccgctcctcatccgcaaggattagagatacgcaaatgattaatgaccggcaaccactattcggtgccggtcattatgagcattgcattcaggcgctacgcacattattgcgcggtagccaactcgtccaggcgggcggcgaagcggggccagtcggtcttcatggcggtgaggagcttgcggttgggcacgtcgtcaatcgggacccagcagatttccatgctttcgtcgtcgtttgccttgggctcgacggtgtggccgggcttttcgaaggcaaacacggtggtgtaggcccacgggccgtggtcctcgcggtaggagccgactacctcgatgtcttcgggagtgatgttggcttcctcatagctttcgcgcagcgcgccctcgatgggcgattcgccgtccgcggtggcaccgccgggaataccccacgtgccgccttcggcgctccacgcggcgcgatgttgcatgaccacgtgggtcaccttgccactcaccgggtcgcgacgagccagcagaataccggaagcaccgttggtgccccaatgcttgcggccgcaggcgcagtccacccagccatcgccgggctggtgtacgttttcgaccggcggcagaatgccagcgtgctggttgcccgatgccttgctttccggttccagttcaccacggccgacattccacaggtcagtccacgtgatgcccagttcgccggccagatgccgggccagcggcaagctgaggccgatgatgccgtgcggatcgccctcaatgctgtcgatgaacgcaccaccgaagccttccagcgtgaacgatccggcgacttccagcggctcgccagtggcaatgtaccgttcgacgtcggcatcggtgaattcgccgaaatggactttggcgtggcttgcgccgcgcacggcacgtccggtcgcgaaatcgatcaggcagtggccggtccacagttcgccggtcgcgccgctcatgcgcttcagtcgttcgcgggccacggcttcgctgtgcggcttgccgtagcattcgccgcccaagaggaacatcgaatcacagccgagaatcagcgggccgactgtcgcctcggtcagtcccggctgtccggcaatagcggtggcgatggattcggtgacggtcggcatatcgatgccggagaagtcgcgcgtggtggcgatttccgccttggaatagtcaatgggcttgccagcggcggcttcacgcaagtcttcgacggcagcttcgcgttccgaatccttgatttccttggccttgagcgggtaggcgatcacgcggtcaccggtcgcagcggcggcagtatcggccacatcacgatacgcacgatgaacggcctcggccttggccgcggccagaatcatcacgcgctgcttgatgctcagatcgtcgacggtgacgccttcttcacgggcggccgcttccagcgcagcaggttcatccacgtgtgagacgcgaattgtggggcagatacccgccgaatacagcacgtcacggcgaggcttggacttggaagcaagaattagcggaatggacatgacttaagtccttatgctcccgctggcgggagctgtcgaacgaagtgagactgagggtggtctctgccggtatggcggaccaccctcagaccgcctgcggcggccagctcccgccagcgggagccttctcctcgacttagcgacgctcgatttcgacgccggcggtgttgatgggcaggtgaagcacacgccaatggccggaagcaagctgctccgatgcgatctggtcgatggcttcgcgggcgttgccgtaatgcagcacgagcacgcaggggccggcaccggagactgcggcggcatagcccttggagcggaagagcgcaatgagctcggtggacggcggcatcagggcaccgcgatacggctggtgcagtttgtcctgcgtggcggtgaacagcagcgcgttggactgggcctgagcggccgcaagctcgtcagcgaacgccgattcacgggttccgccagcgcaagcgcacgtatcggcatcctgggccggggcagcggcgacgccggacttgccctgctgggcggcctgagccagcaccacgggattcatcgcagcgggcagcagacccacgcgagacacgttgtagacggcgtccttgtatggcagttccctaggcagcgcctgacgggccttctcagtggacagctcatagtcgggcacgaacacggcggctgtgatggacgggtccaccgggtagttgacggcgtggaatccgccgtgcagcggttcaccgccaggaacggcgaccgagccgacgccctctgcggtttcgaagtcccaagagacggtcaggccaccgaatacggccggggccacattgtccgggtgtccttcaatctgggcggccatatcgaagacggccggacggttgaggtcaccggtctgggcgaaggccgcggcggcggcgatgccggccacaatggcctcggcggaagagcccatgccacgagcctgagggatgttgttggtcgcttccagcgtgaagccgagtcggccgaggccgaacgtggcacaggcacggcggaaggtggagaccacgaggtgggtttcgtcgcatgggagggtgtcggcaccctcgccgtggatgatcacgtgggcaatgccgtcgttcgggtcgtcgttgagcgtgaaagtgagctcgtcatggtagtcgagcgccagacccacggtatcgaagccggagccgaggttggcggacgtggcgggcacgcgcacgtgaacgctattgcagattggattcatggttgttccttaaaaaggagctccctcatcagagggagcttgggtattcagctttcaccgttcgaccgcctcatcagagggagcttaggtcttgtcagtccagcacgcgcaggatggacgggtcaccggcgacgaagtcgagcgcctgcacggccttgacggtgttgcgcagggtttcctcgtcggtcaggtgggtcacgacgcgcaactgctgaatctcgccgtcatagccgggatcggtcatggtgggcttcaggtcctggttcacaccgttgatggagacaccgttcttggcgaactcagcggcgatggcggccagcacgcccggcttgtcgtgaatcaggaagcgcacggcgaatgcagccttggaggcggtaatcggagccttcggcagattcttgtacagcgggatggacgggccggtgcagccagcagcaatgtggcgggcttcggtcaccacgtcgcccacgacggcggaggcggtcggagcgccgccggcgccacggccgtagaacatgaggtcgtcggcggcctcggccttgacgaacacggcgttgaaggagccgtgcacggaggccagcgggtggttctcgtcgatcagggccgggtagacgcgggcggagacgccggcctcgccgttctcgaccacggcgagcagcttgatgaccttgtgctcggcggtagctgcggcgatgtcgtcggcggtgatcttggtgataccttcaacggacacatcgtcgatggtcacggaggtgtggaagccgagggtggccatgatggcggccttgttggcagcatcgtagccttcgatgtcgccggtcgggtcggcttcggcgtagcccttggcctgggcgtccttgagcacgtcgtcaaactggagacccttggtggtcatctcgtcgaggatgtagttggtggtgccgttgacgatgccgagcatgctggtcaccttgtcgccgaccagggactcgcgcagcgggcgcaggaacggaatcgcgccacccacagcggcctcgaagtagatgtcgacgcccttggcctcggcggcggagtagatctccgggccgtacttggccagcagcgccttgttggcggtgaccacggaagcaccggattcgatggcggcaagcacgaacttgcgggccacggtggtgccgccgatgagctcgatgacgatgtccgagttggtggccacgctcaaagtatcggtggtgacgatggactggtcgatccacgggaacttctcagtttccttcgggtcgaggcaggcgacgccggtcagttcgaccgggcggccgatacgagcggacagttcgtccttctgctcgacaatcaggcgggcggtctgggagccgacggtgccggcaccaagcaggcctacgcgaatcggggtttcgttgttgcgagccaattcagggtccttccaaaaagttttctatatcccaccgctattttacggattatttccgacagcagaccgaaagtactcatcaaagctgacggtccttttcgtattatgacggatttggccgcacattacagactgtcaggcgctcgcctctgcacgtggatcactcgctgacgtcgaggttgagtaggtcgtctacggtctggcggcggagcatgacgtgcgcaccggactcgctgacagcaaccaccgccggaatcagcgcttggttgtagttgctggccatggtgcggccgtatgcgccggtaaccggcacggcgagaatgtcaccgcgcttcaaatcggcgggcaactgcacctcgtgaaccacgatgtcgccggattcgcagtgcataccgcacacacgggcaagcatcgtttcagcggaaccggtgcgattcgccagacgcgcggtgtagtcggcaccgtagagtgccgggcgaatgttgtcggacatgccgccatccacagacacatacacgcgctcggcaatcgggttgccgtcactgtctttggcatcggacaagtgcacgtgcttgatggtgcccacgcggtacagggttacgccggcgggcgccacgatgtagcggccgggctcgaagctgatggccggggcgggcatgccgagcgcacggttggtgctgttgaccgcatccgccaagcgagtgagttccacgtcaatgtccattgaatcttcgccatcggtgtaggccacggagtagccgccgccgaggtcgatttcgggcaggatgtaggcgtcggtggcccacagggtcctgcgcagcagcatcatgcgcttggccgcgtgaatgaaggcgtccgcatcgtggatgttggagccgatgtgcgagtgggctccgaccagttcgagtacgtcctggttggcgaggatggtcttgagcacggcgatggacggaccgtccgcaatggcttccatcgcggcggccagcgccttgtctgtgtcggagacttcctcgtggctcaggtcgtacgggtacttgacgtcgtagtgcagctcgcgctctgatttctcggtcttttccgcgccattttccggggaatgcgtcgcagagatacgcgcgttggtagcggcaggcgtcacgtctttgaggtcgttcagcacgtcgagcacggcggcgtcggccccggcggccagcagcggcacgccgaacttctggtcctcgtgagcagtggagatgtactcgtggccgccggcgtggacaccgacggtgacgcgcagcatcacacgggcgcgtttgccgagcttgcgggcgatggcagcaacgcgctccggctcgtcgggctcgtcgatcacgattttggcgaagccctgttcgatggccagcgcgatttcctcatcggacttgttgttgccgtgcagcaccagacgacgtccgggaacgccagcggcgagggcgattttcatctcgcccatcgtgcaagtgtccacaaacatgccggcctcggtgaccaatcgcacgacttctttggacaagaacgccttgccggcaaagctcacgtgcgtagtggaggtgttgaatgcttcggcggcagcgcgcacgaagtgcctagcacgtgcgactacttcatcagtgtcgatgagatagagcggcgagccgaactcgtcaagcagcgattcggcggtacgaccatgaaattcgatggagccttcggcattcacagccgtagcggccggccaaattggagaaataggcataatcacatcttttcgggggcggtgacgccgaggaggtcgaggccgttggcgatgacctgctggacggcgtcattgagcttcaggcgggcggcggcacgggccggctccgggttcttggcaatctccaaggccttgcgagcctcgtcgtcgccacgggtttccggatcggtcagggccatcggcaccacgcgctctacgttgtaccacttgtgataggtggcggccagttcttcgaggtaacgggccaccttgtgcggctggcggtcgtcggccgcagtggcgagcacgctcgggaattgggcgagggcggcgagcacttcgccgtcggcctcggtgtcgagcagggccaggtcggcaccctcgtagctgatgccggcagcggctgcgttgcggtccacgttcttggagcgggcgtgcgcgtactgcacgtagtacaccgggttgtcgttggtgtgcgaggcgagcagggccaagtcgatgtcgaagttctggttgtaatcggagcgggccagcgagtagcgggcggcgtccacgccgaccacggagaccaggtcgtcgatggtcacgacgttgccggcgcgcttggacatgcgcacgggcttgccgtccttcatcacgttgaccagctggccgatgagaatctgcatgttcttgccgggctcatcgccgaaggccgcgcacatggccatcatgcggccgatgtagccgtggtggtccgcgccaagcatgtagatggccacgtcggccgagttttcggcgcgatggcgcttgtcccagtagtaggcgatgtcggcggcgaagtaggcgaactcaccattggacttgatgatcacacggtccttgtcgtcgccgtgcttggtggattcaaaccaagtggcgccgtccttgtcgaagatgtcgccgcgggacttgagctcttcgatggcggcgtcgaccttgccgtcggcgtacaggctgttttcatggaaccagacgtcgaagttcacgcggaagtccttcatggacttctgaatctcgtcgaacatcatcggtacggcgcgcttgcggaattcctcgcgcacttcggtatcggcctcgccgagcggttcaccgtcatcgttcaggccctgatcctggtgggccagtgcggtcaggtccacgccgtcggactcggcttcggcctgaacacgggcggcgatctcgttgatgtaggcacccttgtagccgtcgcacggggtttcggtctggtagccggcctcacccaagttattggcctcggcccaagcggcgaccagcgacttggcgaagcggttgatctgctcgccgtggtcgttgaagtagtattcgcgcaccaccttggcgccgttggcctcgagcacgcgggccatggcatcgccgacggcagcccaacgggtgccgccgatgtgaatcggaccggtggggttggcggagacgaactcgagattcagggtctggccgcccagatggtcgttgcggccgtattcgttgaccttgttgagatgcttgtcggcgtcggtcacggcaccggcggcgagtacggtgtccaccacggcggcggccgaggcggagtcaagcgtgatgttgatgaagccggggcctgccacctcgaccttggcaatgccgtcggcttcagcgagcgcggcggcgaacggctcggccagatcgcgcggcttcatgccggccttcttggccagctgcatggcgatgttggaggcccagtcgccatgcgcacggtccttcgggcgcatcacggcgagcttgtcgacgggcggaatcagctcgtcggtcaacgcgccggcctggccggcggcgacgaggttgtgggcaatgctggaaatcagttcacttaaggcttcaggactcattcttctaaggatactgagaacggcgacacttgcgccctggtatgcctatatgctgcccctgctggcgggggcaagcacacagccgaaagataccaagcgaaaaagggtaggcgacaatcgccggaatcgttggaggctcgccgaaaccgctatacataccgtcggtcggtatctatagtgatctgcaacatcaagcacagtagggaggccaccatggcacgtaacgctcaccccgaggtgacgcgcacccgcatcctcgacgccgcacaacggctgttcatggcccagggctatgagcacacctccatccagaacatcgtggacgagctcggcgacctctccaaaggcgcgatctaccatcacttcaaatccaaggaagccatcctcgaagagctcatcaaccgagacaacaatatgcaggacgacttcaacgaatccgtcatgaatcgcactgaccttaccgccctcgaaaagttccgcgtgctatggcggcattcgatgaccaagcaagaccacgtgcagatcatgcgagccgccatgccgatgctgagcaatccggtttcgttcgccgcgaatatgcaggtatggagcaagcatctgcccgaacgcttcctgccgctgatcgaggcgggcgtcaaggatggctccatccccaccgagtatccgcgcgaggccgcagagctgctttcgttgctgccgaattattggctgatgccgtatttctacccggcgaccctgcccgaaatggagcatcgcatccgctgcttggccaccatgctcgacgcgatcggcgtgccgattttcgatgacgagctcatcacggtcgccgcgaagggcatgatgacgttcgcaggggagccggagaaaggctcagaatgaatagcacagtgaaacccgagaatgacatcgccggcaccgccacccaacgcccgctgctgtcccgcgacttcgtgctgctggtcgccggacaaggcatctcgctgttcggcaatgtgatgctgcgattcgcgatgtcgatgtgggtgctggacgaaaccggctcagccaccatcttcgcctcggtgctggccatctccatcgtgccgaccatcctgctctccccgttcggaggcgtgctggccgatcgcgtcaaccgccgcaccatcatggtggcgttcgacgccatctccgccgtgctcgtgctggcgagcgccatcgtcttcgccaccacgggcttccatatcgtagccatcgccaccatgcaggtgctgctcgccgtgctcggcgccttcgaaaccccgaccgtgcaggccgcactcccccagatgttccggcagtacggcccggccaccatgcgccaaggcatggccgtgatcaatcaggtccaacaactaagcagtctgctgccgagcttcctcggcggcgtgctgtatgcgatgttcggcatccgtctcatgatgatcatcgccatcgcaagcttcgccggcgcagccgcgctcgaatgcttcatccgcctcagtgccccggatcgcggcgacgaggagctgcccaccccacttgaagacctcaaggcaggcgtgcgattcctcatcaaggaccggccgaacgtgttcagactgctgttgttcgcggcggcgctcaactttgtgcttatcggctattccggcgtcggcttcccgtacacgattcgtacagtgctcggcttcgacgccactgtctacggcatcgccgacggcctgatcggtgtttccggcgtggcgggcgcattcatcgccggcctgttcgccgccaagctcacgatgcgctggctgccggggctgatggcgacgcttacgctggccatggtcccacagggtattgtgttcctgctgccggtcgacgcatggaccaaactcgtggtgctgatcgtattcacctgcggcacgatggtcgccagttgcttcacgaatctcatcgccgtgcccgccatccagctcagtacgcccgaggcaatggccggcaaagtgatgtccatggccgcggccgtgagcatgtgcgcccagccgctcggccagatggtgtacggctgggcctacgaccaaatgccggtcgccatcgtgctgttcatcaccaccgccctgttcgccgtgctcaccgtgctgatggttccgctcgccaagcagttcgaggactgacgatcggcgcgcacgccacatcctgccgcccggccataattgaatcaccgcacgaaaaggcacgaaaaggcacgaaagaggtacctatggccacgctcaacccccaatcattggtcacgttgtggcaaatcgaacagtatggttcgttctccgccacggccaaggccacgggttggtcgcagccggccatcagccagcagatcaaaaagctggaggcacagtgcggttcgactctggtgcaacgcacctcgcatggcgtggaactcaccgccaccggttcgatgctcgcccgccacggcgaggccatcgccgatcggctggagcgggcggcccgtgaagtcgaggattatcggcatcatcggtttgatcacctgcatttggtggccccaccgtcaatctgctctactatcgcggcccgtaccgtggtcaagctcagtatgttcacggacatcgagctgagcctgattcagatggagccgccggaggcgatcggtctgatttcccaaggcaaggccgataccgccgccgtgttccgctacagcagcatcccgaacttcctgcacatcggcgacgacctgaccttccattcgctgggttacgatccgatgcgactgctggtgcgccgctccagcggcatcgccaaacgattcgaggagaccggcgaacctgtgccgctgtccgccgccaaagacgagcattggatcgccggctgccccacctgccgcgcaaatttggtgaaactggccacccgtgccggattcaagccggatatccgccactgcacggatgattactgggccacgcagaacctggtcgaggttggcatgggcgtctcgctggtgccggcgctcgatacacatatcaatctgcaaggcgatctggtggcctgtcccatcgccgacgattttgcggcgcgcgaggtcggcatcgtgactcgtgccggcgaccatcgtcccgcgctcggttcattgctcgaagagctcgagcgcacgtcactcaaatatttgagtgccaagtagtcggacagcgataagcaagcttgcgaacgccatcacgatttcggggagccagaccgttgagcagcccttctgtaccaggaacaatgacatgttatgagcatgaacaacattccccagtcaacgactgtgagcaacgcaaccgccgacgtctcttgctttgatgccaatcacatcgacgtgacgaccatcgaggatctggagcaggtcggttcggataaatggacccgttaccccggctgcatcggcgcattcatcgccgagatggattacggtctggcaccatgcgtggccgaagccatcgaagaggccaccgaacgtggcgcgctcggctacattcccgacccgtggaagaaggaggtcgcccgctcgtgcgccgcatggcagcgccgctacggctgggatgtggatccgacgtgcatccgcccggtgccggacgtgctggaggcgttcgaagtgttcctgcgcgagatcgtgcgcgccggcaactccatcgtggtaccgactccggcctatatgccgttcctgagcgtgccgcgtctgtatggcgtggaggtccttgagattccgatgctgtgcgcgggcgccagcgagagcagcgggcgcaatgatgaatggctgttcgatttcgacgccattgagcaggcgttcgcgaacggctgccatgccttcgtgctgtgcaacccgcacaacccgatcggcaaggtattgacgcgcgaggaaatgctgcgattgtccgatctggccgccaagtacaacgtgcgtatattctccgatgagattcacgcgccgttcgtctaccaaggccacacgcatgtgccattcgcctcaatcaaccggcagacggccatgcaggctttcacctccacttcagcctcgaagtcgttcaacattcccggcaccaagtgcgcgcaggtgattctcaccaatccggacgatctggaactatggatgaggaacgcggaatggtccgagcaccagacggccaccatcggtgccatagccaccactgcggcctatgacggcggcgcggcatggttcgagggcgtgatggcatatatcgagcgcaatatcgcgctggtcaacgagcagatgcgcacgagattcgccaaggtgcgctatgtggagccgcagggcacgtatatcgcgtggctggatttctcgccactgggcatcggcgacccggccaactatttctttaagaaggccaacgtggcgttgacagacggccgtgaatgcggcgaggtcgggcgcggttgcgtgcgtatgaacttcgccatgccctacccgctactggaggaatgcttcgaccgcatggccgccgcacttgaggcggacgggttgttgtagaacagaattgcggctcccctcaaagaggggagccgaggaacggccgaattagtcgaagtcggcaccgagggcttcgagtttgccgcggaagtcggcatagcctcggtcgatcaggctgatgccgtgcacgtccgaggggcctgacgcggccaaggccgcgatcagatggctgaacccaccacgcaggtccggcacgtcaatgtcgcgtccggtcagcggggtcggtccgaagatcacggcggaatgcttgtagttgcgctgccggaaacggcacggcagcgagcccaggcactcgcggtacaactggatggtggcacccatctcgaccagcggcttggtgaagccgaaacggttctcgtacacggtctcgtgcacgatcgacaggccgttggcctgggtcagggccaccacgagcggctgctgccagtcggtcatgaacccgggatgcacgtccgtctcgatcgccacgggcttcaagtccccgcccggatgccagaaacgaatgcccttgtccgtcacctcgaatttgccgcccaccttgcggaacacgttgaggaacgtgatcatctccggctgggtggcacccttgacgaaaatgtcaccgtgcgtggcgagcgcggcggacgcccaggacgccgcctcgatgcgatccgtcagcgacgtgtgcgtgtacccctgcagttccttgacaccctcgatgcggaaggtgcgatcaacgtccacagaaatgattgcgcccatcttctgcagcacgcacaccagatccatgatctccggctcagtggccgcgcccgacagttcggtcttgccctcggccagcacggccgccagtaaagtctgctcggtggcgcccaccgacgggtagggcaggtggatcttcgcgccgtgcaggccgttgggcgcggtgatgtggatgccgtccttgtgttccttgtccaccgtggcgcccagcttgcgcagcgtctccagatggaagtcaatcggacgtccgccaatcgcgcagccgcccaacgcgggaatgaacgcttcacccaaacggtgcacgagcgggccggaaaacaggatcgggatgcgcgacgaaccggacagtgtatccacgtcggccacatcggccagctgcacacgcgaggcgtcgatggtcacaatgccgttcgcaccgtccacatccacgtccacgccgtgcagacgtagcaaatcggacaccacatgcacgtcacgaatctccggcacgttcttcagcaccgacttgcccggtgccagcaacgcggcgaccatcgccttgctcacgaagttcttcgcgccacgcaccttgatcgtgccattcaaaggcttgccgccctcgacatgcaacacgtcatccggattctcagccacgccactctcctcaatcaatcaagattcaaaaaatgctaccgtccagtttgccataagccatgtgccgactccgtgaaatgcaccccagccgaactttgatcaccgtgcacaacggatcccataccccccgtcgaatcaaaccgataacgtgatcttcctcacatttgccgccacggcgttctccatacttctacgctacgattcagggcaatggcatcagacgccatgtccacaagcaaaggagcattcatgaccacagtcgccgtcatcggctgcacgcacgccggcacgttcgccaccacctcgattctcgccgagcaccccgattggaccgtccatgttttcgagcgcaacggtacgctgtccttcctctcctgcggcatcgccctgtgggtgggcgaccacgtatccgacccgaagaaaatgttctactcctcccctgccgctctggccgaagccggcgcgaccatgcatatgcgcaccgacgtgacgtccgtggacctcgacgccagaaccctcacctaccgcgcgctggacgaggccggagaccccgccgaacagaccctcgctttcgacaaactggtcgtgaccaccggctcgcgcccggtcatcccgccgatccccggcatcgacagcccgcatgtgctgctgtgcaagaactgggatcacgccatcgccatcaaggaaaaggcgaaaaccgccaagtcggcagtggtgatcgggtcgggctatatcggcgcggaaatcgccgagcagttcagcgtcaccggcgtcaagaccacgctggtcgacggccttgatcgcccgctggccaataatttcgataagaccatcaccgatcaggtggcggccgcgttcgaggagcacggcgtcacgctcgcgctcggccagaaggtggtcgagttccgcgacaatgacgacgacaccgtcactgtggtcaccgaaaagggcgagtacacggccgaaatggcgattctggccgtcggcttcctgccgaacaccgacctgctcaagggcaaggtggacatgctgccgaacggcgcgatcgtggtcgacgactacatgcaggcgtccgcgccgggcgtgtacgccgccggcgactccgccaccgtgttctacaaccccaccggccagcacgattacattccgctggccaccaacgcggtgcgccagggcctgctggtgggccgcaacatcgagacgccgaccgtgaagtacatgggcacgcaggccacgtccgccgtgcagctgtacgatctctcgctcgccgcctccggcctgacccgcgccggtgccgaacgccgcgggctcacggtccgcgagacctcgctcaccgaggattatcgcccggacttcatgctcaccaccaccccagtcacgtcgattctgacctgggacccggaaacccgcaaggtcaagggcggccagttctgttccaaggccgatatctccggcgcggcaaacgtgatttccatggcgattcaggccggcttcaccatcgaccagctcgccaacgtggacttcctgttccagccgaacttcgacaagccggtctactacgtcggcgccgtggccatgaaggcggcggccgagtaagacggctgtacccaccgcaaaaaagaaaccccggcgtgatgggcgccggggagagaaaggagagaagaagaaagaggttaagttatgcagcttgttcggccgtgattacatataacagcaacaggttcaatgcaacatgggcactgtctgggaatcgtctgggaatcacggcccgtacaggctgttgcttgtttttggagccgatttaccggctggccttgatcttgtgggccagttcggcgtcccacatcgcgccggtggcggacatcaccgagtccgcgccggcgtcacggtacgcctggtagtcggcgggcgagaccacgccgccgacgccgttgatcgcgaaatcgagcccgagcttttcacgaatcgcggccagacgggcgaccatgtcgaggccggcgccacgaatcgcattgccgcacacgcctgagcgatcgcggcccgcgccgggcagggcctgattgccattggcatcgaccagtttggcggaaatcgtattgatggtgctgaatccctgcacagtgccgtggcccacggtggaacgcaccatgagttcaaggtcgccgtcgctggggatgtaggcgagcttgaccatcagcgggatgtcgccgatctcctgcttcacggcctcggtgatgcggcccacgagcagcggattgtggcatagcaggcggttgtggccctcgttggggcagctggtgttcatcaccatgagcttggcaccggtttctttgaccaggcgggcggtggtggcatggtcggcgatgtattcctcctcgctcatgccctccacacgcgagccttggaagctcgggaccagcacttgaccgggaccggcggcctcgatggcggcgcgcatgtccggctgccagacgtcagggctctgcgagggcacgccgaagctgttggagatggaaatcggctgttcatagttggtgtcggccagcacgccttcgtccagttcggcgctgcccggcgtcagtgaaccgtccgccgacttggggtgtacggcgagcacgttcgggaacgggttgcagccccaggcgcgcgaacgcacggttttgtaggtcgccagatcgaaacccatgtggaaagcggccgtggtgaaacggctgttgagcagcgggcctgcgggaatgccgaaaggcagattgaccggctggcccaggaaggaggccgaggcaccctcgctggtggttccggcggcatcggcaccgttgccatccttcagcgcctcggcgaacgcgccgaacggcccttgctcatagttgtcttcgtagctgcggctgacgtcgtaaaacggctcaaaatcactcatgcttcaacgataagccaacctacatgcgtacacgcacactcaacccaccatcgcgccgtcaaacgaaataagagccaacggccctgggcctgcaattatggactcgcctttcgtcgaggctcaatgctggcctcgctgctgtcgcagctcggcacagggcctgctgaaagcccaccgggctttcggcaggccgatcgcggctaaataatgccgcgatcggccaacggccctgtccagtctgcgtcctccggctcgcgggcggactcgattttttcttcgggccagtgcttggcgggaatggtcttgggcttgaaggggaacttttcggcgcgcatcttttcgtagacggcgatgtcgtcctcgtgctgcagcgtcagatcgatgtcgtcgtagccgttcatcagacgccaacgcacgtaatcgttcacctcgaacggcagggtcacgtcaccgcaagtgacggtgcgagtctccagcgagacagtcatctcgcgaccaggctcttcctccagcagcttccacaggagctcgacggactcctgcggcataatcgcggccagcacgccgtttttggcggtgttgccgtagaagatgtcggcgaagctcggcgcgatgaccacgcggaaaccgtaatcgtgcagcgcccacacggcgtgctcgcgggaggagccgatgccgaattcggggccggcgaccagaatctggcccttaccggcgtattccggcttgttgagcacgaagttcgggtctcggcgccatgcgtagaacagggcgtcatcgaagccggacttggtcacgcgcttcaagaacacagcgggaatgatttggtcggtatcgacattggagcggcgcagcggcacgcccacgccggtcagtgtggtgagtttttccataacaattttcctttcggggatctctcccccagtcagtcttcgactgacagcccctcgtcagagggggctcatgtgtattgactcagagatcggcgggggacgagattgtgccgcggatggcggtggcggcggctacggccggcgacgccaaatgcgtgcgcgagcccttgccctggcggccctcgaagttacggttcgaagtggaaatcgagcgctcgttcggtaccagcttgtcggggttcatgcccaggcacatcgagcagccggcattacgccattcggcgccaaagtccttgaacaccttatcgaggccttccttctccgcctgcagacgcacacgggaggaggccggcaccacgagcacgcggtgaatgttctcggccttgtggtggcccttcatgatcgcggcggcctggcgcaaatcgtcgatacgaccgttggtgcacgaaccaatgaacacggtgtccacggcgatgtccttgatcggcatgcccggcttcaaacccatgtatgtaatcgcacgttcggcggcggcacgcttggtggcgtcggcgatcttgtccggttccggcacggaggcggtgatcggcagaccttggccggggttggtgccccacgtcacatatggaccaagcttggtggcgtcaatatccaccaccttgtcgaatacggcatcgtcatcggtcttcagcgtcttccagtacgccacggcctgatcccacagctcgccttccggcgcgtgcggacggcccttcaggtactcgaatgtggtctcgtccggcgcgatcatgccggcacgcgcaccggcctcgatggacatattgcacacggtcatacgttcgtccatggtgaggttacgaatcgcctcgccacggtattcaatcacgtaaccctggccgccgccggtgccgatcttggcgataatcgccagaatgatgtccttggcggtcgcgtccgcgggcagcttgccgttgacgttgacggccatggtcttgaacggcttcagggacagcgtctgcgtggccatcacgtgttcgacttcggaagtaccgatgccgaacgccagcgcaccgaacgcgccgtgcgtcgacgtatgcgaatcaccgcacacgatggtcatgcccggctgggtcaggcccagaatcggggcgaacgcgtggacgatgccctgatcagcgtcgcccagcgggtgcaggcgcacgccgaactccttgcagttcttctccaaagtcgtcaactgcaacgcgctcgtctcgtccgggttcgggcgatcgatatcaacggtcggcgtgttgtgatcctcggtggcgatgagctgatccacgtgacgcggcttgcggccggccaagcgcaggccctcaaacgcctgcgggctggtgacctcatgcatgagcatcagatcgatgtacagcaaatcaggagctccgtcgccgcccttgcgcaccagatgatcggcccagaccttctcggccagtgtcgttcccatagtgattcctccaaaatattccgcgcgaggtattgtgttcgcgccttgttcgtggtattagcctatgtgcttgcgatgggcccggccataagcatgccggatattgagatacggtcaaatgacggcctcaatatgactcggatacgactcgaacatgacctagtcatgactcggttccactccagacatatctcttcggcgtccacgaacgccctttcaacttcatggccaccctgtgagacacttccccaatttgctatttcactatgtgagatggcataatcgcccttattatgactgattcccaagaagagccattgaacaacagcttgaccgagtccgagccggtcgaagacaccaccgccaaggacgatggggaaatccattccggcgttggcgtccttgataaaaccgtaaagattcttgacgcactggagtccggcccgtccacgctgggacagcttgtggccgccaccggtctcgctcgaccgaccgcacatcgtttggctattgcactggaacgccaccgtttcgtactgcgcgaccagcatggccgattcgtactcggctcccgtttcgccgaacttgccgccgcagcaggcgaggatcgtctgctgaccgccgccggcccgatcctgcagaccctgctcgatcgcactggcgagtctgcgcagatttaccgccgccagggcgatcagcgcgtgtgcatcgccgctgtggaacgcacctccggcctgcgtgattccattcccgtgggtgccatgctgtcgatggaagccggttccgccgcccagattcttctggcttgggaggattccgaccgcctgcaccagggattgcgccacgccaagttcaccgccaccaagctggccgccgtacgcaagcgcggctggtccgagtccgtgaacgagcgcgaagagggcgtgtgctcgatttccgccccgatccgcaacgcctccggccaggtcatcgccgccatctcgatttctgggccgaccggccgcatgggcgccgctcccggacgccgctatgcgccgctggtgatggccgccggcaagtacctcaccgaggcactggtcaaagccgttcgctgaaacataccagtcaatccaaccgatagcccaaccggcagaaatcccgcgaggtatccgtcgagacgcgggatttctgccactaatgacacagcggaaggcccccgaaacctcgaatacttcgcgccgcttcccgcctctatcaggaacagttacctgaataaaccggacagttgactccatagcgacggcttgcgcagcaaatcatcgccctcaccttcgccaggcgcggtctggttcaccgcataggtgtaggcgcgtttggaactgggcttgcccaccagttcgccaaactccagcaattgcgtacgcggctcgtaagggtgacggatatcaaattcgatcaatcgcgtggcacgtttggccggagccggtccatacgtattgaatccgcaggttggcgtagcgataagcaacagaccctcatgttcgccgacgaaaccgttgcgatgatcatgaccagctacgacgccgaaatacccctcgcgcagcaattcgaattcgcctgacgtatcagggcaggatatgccttctcccaaatatccgccgggctgggtttgcaattcgtccagcacgtagtaggtatcggcgtgcgaacgatagccctgcatggcaaacgccgcgttggccgccaccggcttcagcacgttgtaatactcgggcatcggcatgtgctggaacaccattgatttcgcaccgatacggtcgggcacggcgttcaggaaggcgagcgctgcgggcgatggtgcgccgaagccgccgccatgcacgtaatcgccggagtcaagaatgaccagacccagcacattgcgcgtatggtcaacgtccataaccggcagcgcgaaggtgcctggttcaccggaacccactgcggatgcgggggaagacacagcagaaggcacaacagcatcggcaccagcatcgtcaacgacgcccagcgtatcagccttcgcggtaacccccgcaccggagccagtggcaccagacggcgtctgcacagcgccacccgctccacaggtgtatgcaatctggttcggcaaggtctcactcggcggattgacacaaccggggaactcacgatagataccgtccagttccacattgcttagcccgcattggaaatcatggttgccatacgtcacagcccacggaatgccgcgcgccgccaacggctcagtgaactggccaatggccttgcgcaccagcgctcgggtatggttcagcgcggattcggcaataggttcgtcacaccagcgacgtttacggaatgaatcggcgaacgccggatcgtagccggcgatctggttgccggagaaaatcaccagatcaggccgtgtggcatcaaggctggcctcaatcagggtgatggtgtctttggagactttcggcccatcctgaatgtcggcaatctgcagcacgcggaacttgccggaatagtggaattgcagtcgtccgagacgcgcagagatagagaccgggcggccgtcttcggcatcggccggcttgatacgaggtttcgacgacatcccctctggcgtacgctgtgtttccgtcatgccctccactgtacacacaaacgaaaaggcccgccggagcgggccttttctacaagttcaactactggagcagaatctctgcacaacatcatcgttgtaacggtaagtctttccaatgcccgtccaacgtaacagtcctcgtgaccatacactatttgtgggctctgctctgttcagttgttcttgtacctcataatctattcatcactcccgtttctcgcaacctgcagagagtcgttgtgcgttttttatcacaactgttcaatcgcactttctggctatcggaaaacgagctgaaccgttcacatcgaacccgtccgatgttcgatttcgttcgtttcaccgccgctcacggcgtgtcgcgagcgacgctagcacactcaaaaccaaccaacaccgaactaacatgaacacccgttgaattctggcgcgttcagtcgttttccggccacgccaaagcttacgatataagctatggcacagatatttgacgcaccctcgaaggcaattctgcgcagccaaatcgcagagcatattgccgaaaacgacaacaacgaccgccgcgtcgatcaggaaggcgaggcaccgctgcccaaggaccgtttcttcgaccgcgagctcagctggctcaagttcaaccagcgcgtgctcgaatgtgcggagaacgaagacatgcccctgctcgagcgcgccaacttcgccgcgatcttcgcctcgaaccttgacgagttcttcatggtccgcgtcgccggcctgaagcgccgtatcgactcgggcatcgccgtgccgtctgccgccggcctgagcccgcgtcagcagctgcgcgcgatcagcgagaccgcacaccgtctgcaagacgagcacgcacattacacgatcgacaccattctgccggaattggagaaggagcgcatcgtcctgctgacgtgggacaagctcacatcctccgagcaggagcgcctctcgcgctactaccgccagcaggtgttcccggtcctgacgccgctcgccgtggatccggcccacccgttcccctacatttccggcggttccatcaacctggccgtgattgtggagaacccggcctccggcaagtcgcacttcgcccgcgtcaagatcccgggcaacctgccgcgcctggtgccggtggacgacatgaccgatgaggagtccaaggacgagcgttacggcttcatcgccatggaaaagcttatcgccgcgcatctggaatccctgttcccgggcatgatcatcaaggaggcccgctccttccgcgtgactcgtaacgaggacatcgacgtggaagaggatgacgccgagaacctgctcaacgccatggagaaggagctgctgcgccgccgcttcggaccgccgatccgcctggagatcacggacaccacgagccccttcctctcccagctgctcgccgaccagctcggcgtgagccaggacgaggtataccgtctgcccagcccgctggacctgaccgtgctctttgagctcggcagcgtggaccgcccggacctgaagaaccgtccgttcgtgccgaccacgaaccgtcagatcgccgaggtcgagtcctcccgcgcacaggatattttcgctgccatccgcgagcgcgacatcctgctgcatcacccctatgactccttctccacttccgtgcaggccttccttgcgcaggccgccgcggacccgaaggtgctggccatcaagcagaccctgtaccgcaccagctccaactcgccgatcatcgacgccctgatcgacgccgctcatgccggcaagcaggtgctggctttggtggaaatcaaggctcgtttcgacgaggacgccaacatcgcgtgggcccgcaagctcgaacgcgccggcgtgcacgtggtgtacggcatcgtgggcttgaagacccactgcaagctcatcgaggtcgtgcgtcaggaagcggacggtctacgccgctactgccacgtaggcaccggtaactacaacccgaagaccgcgcgactgtacaccgatctgggtctgctgacctgcgacccggtggtcggccaggatctgactcgtctgttcaaccagctctccggttacgcgccgaagtccagcttccaccgtctgctggtggccccgcgcaccgtgcgcaccggtctaatccagcgcatccgccgcgaggaggacgccgcccgcgctggcaaggaggcctggatcaagatcaaggtcaactccatcgtggacgagaagaccatcgacgccttgtaccgtgcctctcaggccggcgtgaagatcgacatcgtcgaacgcggcatctgcgctctgaagcccggcgttcccggcctgtccgagagcatccgcgtgcgttcgattctcggccgcttcctggagcactcccgcatctacgccttctgcaacgcggacggcccgcagatcggcgagggtccggcttccggcccggaggtctacatcggttcggctgacctcatgcaccgtaaccttgatcgccgcgtcgaggctctggtgcgcgtcaccgccccggagcaggtcgacgggctcatcaagtacgtggacctgcagatggccgactccaccatgagctggcacatgcagcccgacggcacgtatgtgctgcacaccaaggacgacgagggccgcccgctggtcgacagtcaggaatatctgattcgcaagcaccagcgccgccccaattcgcacaactgatttcattcgatgctccctgtcagcacgagctgactgagggtggttacgatgcccggctcctctttcgagaggatgccgggcatcgttgttcagcgcgcaaaaactacgtagcagcggtccaacgtgacctacaatacaagagatgggtacgaacagtatgagacgaatcgtggaagccgccggcggtattctgtaccggtggaaggatgatgccgagccgacgcgggcatcatctccatcagcgaaatccaatattgccaccgatggcaccatcatcgcgaataccgcggattctgacggcaaggccacggcagcacacggcgcatcggacgcggcttccaccccggacccggcgcaggccgacagcccggccgcggtggacaacgtactcaaccgcatcgaactgtgcgtcgtgcatcgcccgaaatacgacgactggagctggccgaaaggcaaggtcgacccgaacgaatcgcaccggcatgccgccgtacgcgagatcggcgaggaatcgggcctgtccgtggagctcggtccctatctgggcgacatcgagtacccgctgtccgaagaaggcagcaaacagcgccataccaaggatcggtcggcggataccaagcatatccagttctggatggccacgccgatcagcgccatcgacaacctgcggcgtacccatgcgtttggcccggtgcatcgggcggacatcggcgaaatcgacgaagttttgtggctgacgccggccgaggcccgcaagaagctcagccattccaccgataaggacatcctcgcgctattcgttgatcgggtgcaggagggcgcgcttgacgccgtgccggtgattatcgtgcgccacggcaaagcggaagcgcgcaagctgtggaagggttcggacgcgaaccgtccgatcacgccgcgcggcgcggctgcggcatacgcgctgaaccgcgagctggcgtgtttcaatccgacccgactggccacgtcgccttgggtgcgctgccaggagacgttggagatgttcgcgtggcagaccggacgagacatggttcatctcgatccgctcaccgaagatgcatacgccgctgcgccggacaccgcatgggagtgtctactcagcgaaatcgagttcgcacttgagcgccgtcagcccatagcgatatgcatgcaccggccggtgattggtggtatgttcggacacctgcgcagcatgtgcgttgcgccgtctctgagcaaacgcctgatcgccaagacaccgttcatgccgaccggcacggcggtggcgctgttcgtcactccgacgcctcatggtcccaaaatcatcgatattcagaaggttcaaccgcttgtctactagacccgcatttcctgattcatccaactcctcggccgctgccgctgcagctcatgccgcgcacaatggtgccgccggcagtctgggcccgggcttcggctcgttgcgtgcggccggagcggcattcggacctgctcgcatgggttcttcacgcccctcgcgcccggctcagctcgacccggctgtggccgatggattggccggtggcatggacccgcaggcgttgagcgagatgagtcatctgtctgctgccgcattgctggatcgtgtgcgccatagcgaagacccggcggttgttgagcgggtgctcacgttggtggagacggtcggcgtggatgaaatcgccgaactatggagcgataccgagccggattcgctgcctggtgtgctgtggcgactgtatatgttgcgtacgtggatgcgatcgaatcgcgactcgatcgcgcatctgtggcgcttgggtgagccggtggccactaccgcctccgccatcgccggcgtggatcaggctcccagtgaagatgacatcgtgcgattggccgattcgattctctccggtgcttttgtgggcgattttgccgtggcgcttgagcgtgcggcggcgtttaccgatgtggtggcgttgggcttgcgcgtggaggcgcggcgcatggtgacccgggccgaggccaacggcggcttctcctcggatgccgatgagaaggccgtgcgcaccaaagccgcccgccttatgcacaccgccggcagcctcatggccaccgccaaggatttccaacacggtgccaacctctggcgtcgcggacggttggagtaaccccgctccaggctccctctgatgagggagctgtcacgggcgatgcccatgactgagggagaaacccaccaaccgcaccccaacaatcagctaccagccaacaccacacctcccccggcgcggcgagccccatcgcaagctatactgagtatccgcgtcggaccgtgcttaagccccgggctccattttttgccgccgcgagcggcccttgcgccgacaggcgctttcgcggttcggcgcttcttttcttttaccagattcacgccccgagcgttgcgatgggcacgaccagtatgccgtcattgcggcgataggccttcccacctcggccggtaaggaacatcatgaattcggggtctcggacctgagccatgggattgccgcagattttgttgcggaaggatttgagcttatccgcattgtcatcgttcaccttaaggtcactgagttttatttcgatggcaccccacctgccgtcagacaactcgataatgacatcaacttcaagccccttgtcatcgcggtaatacgcaatgcgattcccggcacccggcatagccgacagatatacattcaaatcacgaatgcacagcgtttcaaacagatcgccgagcgtctgtgtatcgcgcatcagagtattcggcgcggcacctaaaaccgcagcaggcaacgaaggatccacgaaatatcgcttgggcttggttcgcacacgactctttgcgcggagtggcggttcccaaccctccaaatccgtcagaaggtacaagtccttgaacatttccaaatagctcttcaccgtctgcgtatccggctcacgccgctcatcgccatatgccatatccgcagccagcgtcgcatattttggtgcctgcgagatgttcacggcaagagctcgcatcaaagctcgtgcagtttcaggattcttcttcatcttcggcacgctgatatccagcacacttgcgatatattcgcccgggatttccaaggcgaattcatcgtctagctcaagattcgcgggccatccgccacggcaacaccatctggcgatgtcttcgatactcgtattgcattcggcaggctcgaatttcccctcgaacaaatcggataggctgaccgcgcccgtggattctccggattcagccaagctcatgggccacatgcgcagacgagcaatgcgaccagtgccgctgtgatgaatggcgtcacgatcctttggaatagccgaacctgtaagaatcagctgccccttgcggttcgcattgtcatctatatggcgacgagcggcatcccaaatttgcggtacatcttgccattcgtccaccagatggggctcctcccccatcagcaccaatgcaggatcggtttgggcggccgcgaaaactgccacatcatccagacgatcaacgcttcgagaccgggagagcgcggtccatgtcttgccgcaccatttcggcccaacgatttccactgcaccgaacgccttgagcagtttacttaatctgctatctaccacgcgtgaacgataatcaggcctggtcaaggtaccatcgcgaccactcaaatcgttcatattgcagcctttcccagttctatcgttctaacaatatagattttacaccagtttcattcccgattttacacctatctcattcccggttttacaccagtttcattccctgttttacaccgtgttgttttttacgctttaccctctcagaggtatcagaggcagatctcggcacggacagggcattgtcctgctgcaactggcctatcgcagcaaaaagtcgaatcacccacaaatccaatccgataagcaagccgcgccattaccaattcggcaggtcggcaaacttggactaggctgggaatcatggaactccatgttttgaatcatccgctggtcgagcacaagctcaccgtgctgcgcgacaagaacaccccctcctccaccttccgcgagctcgtctccgaactcgtgatgcttgaggcctacgaggccacccgcaacctgtccgtggtggccgcgccgatcgagacgccggtcgccccgatgaccggcaagaagctcgcctccccgcgcccgatcatcgtgccggtgctgcgcgctggcttgggcatgctcgacggcatgacccgcctgattccgactgctgaagtcggcttcctgggcatgaagcgcgacgaggagcaccccacccagcaggtgacgtacgcgaaccgtctgcccgaggacctgtccggccgccagtgcttcctcatcgacccgatgctcgccaccggcggaacgctggtcgccgccacgcactacctggccgagcgcggcgccaaggacgtgaccgcgatcaacatcatcgcggcccccgaaggcatcaagtacgtcgaggagcacatcgacccgtccatcgacttcaaggtcgtggtgtgcgcggtcgacgaacgtcttaacgacaagtgctacatcgtgccgggactcggcgacgccggtgaccgtctctatggcgtaattgactgatttccctggctcccctccccgaggggagccaacataacggaacatctatgcaaatcgacattattgcgccggggcgcgtgaaggagcgttaccttcgcgacgccattgacgagtattccaagcgactttcgcgctactgcaagctcaacatcattgaagtggcagatgagaaaacgcctgaccatgcctccgaaggcgttgaccgacagatcaaggccagagaaggcgaacgcatcgccaagcatctgaaggacggcgcgtttgttattgcccttgccatcaatggcaagcagctgtccagtgaagaattggccgccaaaatcaacgaccttggattgcttggcaccagccatattcagctggtcatcggcggttcaatcggccttgacgacgcgattctgcgtcgtgctgattttctgctgagtttctcgaagatgacgttcccgcatcagcttatgcgcgtgattctgctggagcagatctatcgcgcttataaaatcaacgctggcgagccgtatcacaagtaaaacgccatacctcatggggcgggaaatcccccatggggcggtaattgccccatgaggcggcaaaatcctcatggggcggtatgccaaaatggcttaattccgcggtttcacatattcttcaaaccgccccatgggcaagttaccgcccgatgagcctgtaaccaccccatgggcgcatcaataacgccctcaacctcacactgcgtcggggacgaacgcttcgaagatgtggcggtcgaagtagggggcgcactgggcgagttcatcgctgctgcgcacggtccatgaaaccggcatcgcacccatcgaacgagcgagcttgacttgcggcgaagcgccaccggtccagtcataagccacgaaatcaggacgagacagccagtcgaacgccagtaagccggcggcccattcagccgcaccattcttgctcagcttcgccggccagctcagctgaccgcggcacacctcagggtgatgctccttgtaccaattcaccgcgcccgggtggaaggattcgatcacgtacgggccgtcatacgcctcaagcaaggcgtggcccttttccatgagctcttcgctacgctcatcccaagccctgttgttgctgaacttgtattccacaatcagcggagcccggccggccaccacgtccagcacatcggagaacagcggcacatgctggtagtaccccttcggcgcggcggacggcgtgaccaccagcggcgggttcgcgtcggcacccggcaacggttcggccttcaaatcgcctgactcgccgttcgggaagagcggaatacgggcgagttcgtcgtaagtcaggtcttcgatgcggcgcggatcgccggccacgcgcaacaaatcggcgtcatggaccacgaccacttggccgtcgagcgtaagctgcacgtcgagttcgatgccatagccagcctcgcaggcggcggcgaacgcggccagcgagttttcgggagcaatcggaccggtcatatccgcactgccgtagccggccttgacagccatgcgacgggcaagcgacacataatcatcgttttcggcgatggatcgctcagtggtatcggcttgggcgctaaccggattatccccaccataatcagcgatatcggtatagccgaccaaaccagaacccgcatcatgcaagccacgatgggcataccatacctccggaatggagggcacgaaattacgacgcttgtcattgaacgtgcgcggggccacggcccacacggcagcaccggcggcggccacgcctgccagcgccacgtttctccagagcttcgacgacattggaatccttcctgttgggctgcctctagcctaacgcttctgccagccattgtggagtggttggatcatccggtttcagcgcgcggtccaggtggttggcgcgcagtggctcccagctgaaatctgccagcagatcggcgggtttgcaaggaattggagtgggttgcagacgcagcagccaggcgcagtatccgatgatttgctcgggggttacgttgcgggcgcgcaaggctcccatatccagcgaacgttcgcgcttggctaaacgccggccggccgcattgtcgataagcggcaggtgcgcatactcggggtgctcggcgagaggcttttccgtgttgccgcattccggctcaaagccgccagccaacagacactggcgaatccacatttgcagcgcggtggagcgcagcagatcacggccgcgcacgatatcatcaacacccatatcgaggtcatccacgaccacgaccagttgatagccgaacagtccatcggctcggcgaatcacggaatcgcctacctcgcgggccaaatcgtagtgctgtggactatagacacggtcgttaaagcatgcgacaccatcaacgattccggcatcgccctgctgttccggcggcacggctcccgacagcgcagcggaatcgtcaggcactgtacgttgcttttctcccgctgccgattccggcatggcgatacggatggaatgctggtcgccgcgaaccaaacgggcacggacctcgtcgggatggtcgtgcagcaggcggcggcacgtgccggggtacaccatgaagccgtcgccctcgttgggggccgaggcggcgcgaatgtcggcacgcgagcagaaacaggggtacagcacaccttgcgagcgcaggcattcgagagcgtattcgtatcgttcagtgcgctgggattggaacatcggttcgccatcccagtcgaggccgagccaatgcaggtcatccatcatgagctggtccgcaccggcgaccacacgcggcttgtccacgtcctcgatacgcatcagcatgcggtcgccacgcgagcgggccgaaagccatgcacccaacatggcgtacacgttgccgatatgcatgcgccccgacggcgtcggcgcgaatcgtccagtcactggccctcctcgtatgaagttcagcaccatggtagcgaaaaggctctcctcctcagaggagagccaatatagtgaagctcgccagcccgaactcccctcagtcagcttcgctgacagctttgctcagagaggggagccagtgattgtcacttgtcttcggtgacgttgtccacgctcacgtccggattgtcggagacaatctggtcgctggcccaggcggagagctccagatgttcgccgccggtctggtcgacgagcacggtgtcaccgtcgtggaccttgccggccagcagcatacgggccagctggtcgcccacttcggtctgtaccaggcggcgcagcggacgagcgccataagccgggtcgtaaccggtgttggccagccattcgcgagccgagtcggtgacgtccagcgtgatgcggcgatcggtcagacgctgggacacgccagccacctggatatccacgatgccgccaagctcctcgcgcgtaagcgggtggaacatgacgatgtcgtccagacggttcaggaactccggcttgaagttcatgtggacagcgtccatcacggcctttttcttggcgtcggcgtccatgtcctcgttcacgaggaactgcgagccgaggttagaggtcataatcaggatcgtgttcttgaagtccacggtccttccctggccatcggtcaggcgaccatcgtcaagtacctgcagcagcacgtcgaagatctccgggttggccttctcgacctcgtcgaacagcaccacggaatacgggcgacggcgcacggcctcggtcagctggccgccctgctcgtagcccacgtagcccggcgccgcgccaatcaggcgcgagaccgaagccttctccatgtattcggacatgtcgatgcggaccatggccttctcgtcgtcgaacaggaagtcggcgagtgccttggccagttcggtcttacccacaccggtggggccgaggaacaggaacgatccggtcggacggttcgggtcggagatgccggcacgcgaacggcgcaccgcgtcggacacggcggcgatggcttccttctggccgatcacacgcttgccgaggtagtcctccatgtgcagcagcttctcgttttcgccctgcatcaggcggccgacgggaatgccggtccagtcggagacgatctcagccaccgagtcggcgtccacacggtccgggaccatcggctcatcggccgggttggccgcgctggcatcagcagattcagcatccgcgctctccgcggcggcaagctccttctgaatggacggaatctcgccgtacagaatcttcgaggcctccgccaagttgccttcacgggtatacttatccgcctgcacgcgcaggtcgtcgagcttggcacgcaggtcgccgaccttgttgtggccagcctgttccgcatcccaacgcgccttgagaccgctgagcttctcacgggtgtccgcaagttcggcttgcagcttgcccagacgctccttggacgcaggatcctcggccttcttgagctgcatttcctccatttcaagacgggtcaccttgcgctgcagctcatcgatctcctcaggcgaggagtcgagctccatacgcaggtgagcggccgcctcatcgaccagatcgatggccttgtccggcagctgacgacccgaaatgtaacggttcgagagggtcgcggcggcaaccagcgcgtcgtcgccgatcgttaccttatggtgcgcctcgtaacgctgcttcagaccacgcagaatggcgatggtgtcttccacgctcggctcacccacgaacacctgctggaaacgacgctccagcgccggatccttctcgatgttctcgcggtactcgtccagcgtggtcgcgccgatcaggcgcagctcgccacgggccagcatgggcttcaacatattgccggcatccatcgagccttcggccgcacccgcgccgacgatggtgtggatctcatcgatgaaggtgatgatctgaccatccgcattcttgatttcgttcaggacgctcttcaggcgctcctcgaactcgccacggtacttcgaaccggccaccatggagcccaagtcaagggagatgagcttcttgccttgcagggtggtgggcacgtcgcccgccacgatacgctgggccaaaccctccacgacggcggtcttgccgacgccgggctcgccaatcagcaccgggttgttcttggtacgacgggagaggatctgaatcacgcggcggatttcctggtcacgtccgatgaccgggtccagcttgccttccttggcggcggccgtcaggtcggtggagtacttctctagggccttgtacgagccttccgcgtccgggctggtgaccttcgcgccaccacgcacgccgggtacggccttgcgcagggaggctgcggtgacgccgttcttctccaagatttcggccgactggttcggcttgctggccgcgatgccgataagcagatgttcggtggagacgtattcgtcgcccatctgctgcatttccttctcagcctgggcgatggcggcggtcagctggcggctggcctgtggctgcgaggtgctggatccggatgcgctcggcagcgcgaccaaagcgttgcgcaccgccgcgccgatggcctgcgggtccccgcccgcggcctcgatcagagagcgcgccacgccgttttcctggcgcagcagcgcatccatgacgtgcagggtctcgacctgcgcgtttcctgcggcggacgcactctgaatcgcgtcgccgacggcttcttgggccatagtggtgaacttctgttccatatcgtattcctccatatcatgcggtctgcgcagtgcggctcgcgggcttcgaaagccctgcgagcgttgcgacagaccgcagcttgtcgttgtctgatatggtcaaccgacctggaacccattctattcccaaaacttgagtgcatatgactcaagttttggattttggtggggagggtgactagtagccccctctgatgaggaagcttgggcagccgctacttcagtgcgccgacggcggattcggcggcggcgaggacttcgccggagagaatcgcctcggccacgccctcaatctgcggggtggtccaggtatcgcgtacgtcggggccgatttcgttggcgtactggcgcaccacgcggtatacggcggcgcccgccgcacccggacggtacggcttgcggaagtcgaaggagcggcaggagcacagcagttccacggccagcacgcgcgcaaaggccgaaatcgaccggcgcagcttgcgggcggcggcccaacccatcgacacgtgatcttcctgcatggcggagcttggaatcgaatcgaccgaggcaggcacggcgttacgcttcatttcggagacgatgccggcagcggtgtattgggcgatcatgaaaccggagtccacgcccgggtcaccagccaggaacgccggcaggccgcggttgcgcgccacgtcaaggaagcggtcggtacgacgctcggagatagaggctacgtcggcggtcggaatcgccaggaaatcgagcacataggccagcggcgcgccatggaagttgccgttggactccacacggccgtccagcgtgacgcacgggttatcgatggcggaggcgagttccacgcccgccacggaggccgcgtattccacggtgtcgcgggcggcgccgtgcacctgcggggtgcagcgcagcgagtaggcgtcctgtacacgcacggtggagcccgggcggccggcctcaatcagaccagagtccttgagcatgcgggcgatgttcgcagcggaatcgccttggccgcgatgcgggcgcagcgcctgcaagtcggcggcgaatacgcggtcgttgccgagcatgccttccacgctcatcgcggcggcgacatccgcggtcttgagcagcaggcgcagatcggtgatggccatacacaacatgccgagcatgccgtcggtgccgttgaccagcgccagtccttccttctctttcaaatcgacgggcgtgatgccggccgcacgcagcgcttcgccgccgccgatcttgaggccgtcagcgttgcgggcctcgccttcacccatcgccaccaaagcacaggctgcgagcggcgccaaatcaccggagcatccgagtgaaccgtattcgtagaccaccggggtgatgccggcgttcagcatatcggcgtagacctgcgcggtttccgggcgcacaccggtgcgtccggtgcacagggtgctcaggcgcagcaccagcaggccgcgcaccacctcacgctccacttccggtccggcaccggcggcatgcgagcgaatcagacttttctgcagctgcgcacgctgttccttggggatggaggtggaggcgagcgcgccgaatccggtggagataccgtaatgcggcacggtgtcgtcggccaaatgatcgataaccgcgcgactcagcgccatctcatgcttcgattcgtccgaaatcgccactttggcaccgccgcgcgctacggcgataacgtcctcgatgctcagcgctccaacacctacggtgaccgtctgctctgccatgctcatacctttctatatatgtgccgcattccgcatatacgacatatgcggcacatgcttcgccggggatccgcgactgcccgcattcgctcaccgcacctgcccatcaacagcaggcgacgcaaacgcgaccaatcgctccccgagtaatcaaaccttggccatttcacctcagtcggatgcccgccataagccacttcgtccatcttgtgtctgaaatctcagacatgtaaggtgatggaaatatgagccatgcctcgcagcaatacgccttcaccgagccacgtaccgtcaagcgggcgcaggtgaagccatcagaacgggaacatcagacatcatcatccgcgccacgtgtctcgctggctccggcggccgaccgtacgctcgacatcctcgagttcatcgcgagcaatggtcagacgcaagccgccacgctcgctcgcgaactcggcattccgcgctccacggtgtaccaattgttggagattttggagcgtcacggactggtcacccgccttgccgagcagcgcgcgtacggcatcggactcaagactttcgagctgggatcggcctattctcgccaacatcgtgtatcgcaggtcgcgcatccggtgttggcgcgtcttgttgacgagaccggcgaaaacggacatctggccgtgctgcacggcaacgaaatcatttatgtgattgaggagcgcgccgcgcatcgcccgccgctagtgtcaggcgtgggcgtgcgcctacccagtcacctgaccgccaccgggcgggccattctgtccgcactcccccgcaatcaggtccgcgcgctatatcccaatcgtcaggcgttcaccgaccgcaccggcatcggccccaaatcgcccaaggagctggaggcaacgctcgccgaaacccaacgcaccggttttgccgaggaacacggagacgtgacgcccggctttgattcatacgccgtcgctgtgcgcgactacaacgactttcccatcgccgggctggctctcactttcgtgagcggatcgctgcgccccgaacaggagcggtcgcttaagaccaagctgcggcttgccggcacggaactgtcccggcgtctcggcgcggtcggcagtttgacatgaggattcgcgagatcatcgtgctgggctccttcgccccgatcacgattttctcaactaagttcaccgattcgctgaccggcaacgccaaactcgccggcttctcgctgacagtgacggccatcatcagcctggtggtgatgaccgccctgcacgcacttctgccgggagcgtaaggcgcgttcttggttccctcagtcagcttctccgcctggacggttcccctcagagaggggagccagaacgagtcacgcccgaacgattacgttgcgcagatcaccgatgccttcgacgtgcacgatggtctcgtcgcctgggtcgaggtggccggaggcgttcggggtgccggtcatgatgacgtcgccaggcagcagcgtggagaacgacgaaatggcggcaatctgctcggggatgccgtgaatcaggttcgcggtggtgccagacgccatcggcacatcctcgccgttcagcgtgaaggaaatcttggcgtccttccagtcgaggtcgtcacgcatcacgatccacgggccaagcggacaggaggtatcgaagcccttggcgcgcgtccacgtggggtcgatgccctgcagatcgcgcaacgtcacatcattgacgcaggtgaagccgagcacgtaatccatcgcgttctcgacggtcacgttcttggcgatacggcccatcaccacggccacttccggctcgaagttcatgtccttggagcaggccgggtacacaatcgggtcgtcggggccgattaccgaggtggacggcttggtgaagatcaccatgtcttccggcgcgtgggcgatttcggagtggccggcctcgtgcatgaactgggcgtgggcctcatagttcttggccagaccgtaaaccttggaggggatgaccggggagagcagacggatgccatcgccgtcgaccgggtaacgagtgccggtgggcttgacctggtcgccggccagcggatggccgtccagttcgatgaggtagtccttgccgtccgtttcgtccttctgcacgaaggcgtagcgcggcgaatcattcaaagaaaaacgtgcgagtctcatgcctgtaagcctactccttggcggttccttccgcagaagcatccgtccaaggagcaagcagaccggccttcaatcgaccaaaacgcacgttcgctgggattgctacttttcggtccaggttttgtcatacagcgactggccgctttgcgtgtgcatgatgacgcgcaatgatgccttgccgctggaggtcttgcacatcgagcccagcagattcgcggtggattgataggtgctgtccatagcatccagtgaggaagcggcggtatcgcctagcgaggcatagctgtcgtcgagcacgtactcgtacaccaaggtgtcaccgtcgacacggtagttgaaggtgatgccggtgtctgcaaacgtatccgcttcggattcaatggagtccttgaattccaaagagtcgacgaaatcctgaatcgaatcgtacagcccataatcgccgtcggttagatcgtcatgggtttcgcccaacgtgtcgtccagcgcatcgtcaagattatcttgagctttgctcttatcgctgctatcaccgttgcccgaagaggactgactatagaaggaatcggttttcgcctcatctatagccttgctggcatacgaggcaccgccgacgatcagcgcgatgaccagtattacctgtatcaccatgcccgccgcactgatgatgatgccggcgatggccaagcccttgcccttgccgccctgtttcttaatctggttgaggcccacgatgctcaggatcagaccgaggagtgagacaaggaacgagcagataaaaccggcaatagccagaccgttgtacttctggttcgcttcaggcggcacactgccgtaagaaccagaccatcccggctggccgttcggttggccgccttgcatatacgggttatagggcgtttgcggaggcacggccccgccgcccggatataccggagcactgacgctgccgtagaccggaggaaccgatccgcctgccggagccgcccccggatagggcgaattgggtgctgccggtgcgggcgcaggcgcgggcgctgccggtgcgggcgcgggcgcagcggcaggagtcactggtggcaaagcctgcgtaggcggtaccggctgattggccggcgcaaaaggctgggtgggctgctcggcaggtgtaaacgcctgcgtaggctgttcaacaggagtgaacgcttgagtgggctgctcgcccgctgcgattgcttgggtcggagcattgttggcggcggttcccgtttccgccgtcatcgcatttaacggctcagtcggattggcgtcagcttgctgccacggcacctggccgttcggattgacattcggatcagtcatgacatgcactccttcaactgcatcgcacctcacttgcgagatgcgcccctcgtcttacgcgccacattgtgcgttacagacaactgtactcctcgtggcgagccttaagcaccccaggaaatttggtccccgtcatcgacgcgacgtggcactttaccaattcagtcaaataattgcttcacgaacaccaatcacgctcaaactttgtgcatttggcgcggtctccaaaccagctgttcaaaccactctctgcggagcgattcttgcgtcagaagacgggcagcccctcgactggctcgtagcgtgtggcgcggccacgaccacgagattgcgcaaagccgtcttcaacgagacttttcagcagtgcccgagcacgcgagacccctaattccatatgctccgctaattcggaagttgatatgctgccttgactcacaagatactgtagcgcttctgattccgatttggagaggtgtcccacggaagtccaggatttcatggactcgttatttgctggcgtcataacagatccgccaaggtttgtgtaccgtactacaagttttacgcgatcaggacgagttagcacttccagcagtggatgcggcgcgccaacagaatcacaaccagctcgcatcacatcaaagccacttcctgctttttcaccgataccgatgagaaaaaacattttcatgaggataggattgcgtgcatcagatattccaccttgctccgcctcggcctttgtaacacggagccgcccaggattggtgaactcgatggttgattggcgcctaataatcacagtgcctcttctacccatatagtccgcatgaacgatagcgttggttaacgcctcgcgaatagtgatttccatgggattttcatccatacgtcgcgcttctccgtccaaacggaatgggcgcggcaccgcctgccgcagcctaccatatactgactgccaaaaatcatataagttgccggaccaaattccgtcagtagaggtaatgcgatcatcccaacgatcgagtccaatttcttcacgatagtcaaggaaataatttgcgaattcccgcacgatatcatattcgcgcccaaacatcagcaatccagcaatagttggatgcaactgattatctttggtagaacgagcgagcgcctgcagacgcacgagaaaatcttcgtcattgaggttacgccacggatggttcgggcgaatcctttgaaaataagaacggtacgaggcaatcgtgcctgaatccaatgcggcactacccaaatcttccacgatacgaagatcctgaggagtgtcgctgccatcgcgaaacattgctttgacttcatcccggtcgcaatggtagtcaccctcgttattccttctgaaggtgcccctatgctgttcccggctaaaaggatcagcgcccacatatataggcatgatctcccgccctgcacgagggacatgaatcacgatgaaatcaccggacgatccatgtcgaatcacaacatcttggtcggaaagtactgtggcgttgaccttggaacggtcattgacagtattccaaaaatcccgtttgagcttttctgcatccgttacccctgttacattcaattctcgtcgcgagttctctgaaacaccaagaagaataagaccgccatcagagttggcaaatgcactatacgtatcccatagactgtctggtaatttgtctttggcctttttcgcctcaatacaattagcttctcgaagtagcctcacatccgactcggaaaggctggcaaaagaaatcaactcaataacgtcagaattcgccactttatacgcctttccgccagtctaccgccactttatacgcctttccgccagtctaccgccactttatacgcctttccgccagtttttcattctggggaagccgagccatgttcaagcagcgtcatccccccacttgcaacattaaaaacacagaagcctgaaaccggctattgcctcagcaatattcagtcggtttcaggctaaatcgttaatcctctggcgaaacgacgatctacttcttcagcagcggtgcgacttgctcctcgtaggcggtcagggcggtgtcgatcacgttgtgcatgtcgtagtacttgtacgtgcccagacgaccgccgaacacggtgttcggctcggccttggccttggcctcgtactgggcgtacagtgccttgtccgcatccgtgttgaccgggtagtacggctcgtcgccacgctcggcgaaacggctgtattcctcccacaccacggtcttgttcgggttctgggcatcgtggcgctccgggttgaagttcttgaattcgatggcgcgggtgtagggtacgtccgcgtcggagaagttcatcaccgggcagccgaagtggtcgccttcgtcgtagcggacctccttgaagtcgaccgtgcgccacttgaggtcgccgagctcatagtcgaagtaacggtccaccgggcccgtgtacaccaccggcacgcccgcggccttgagcgcggtcttgttgtacggctgggactcgtcgaagaagtcgactccaagctccacagtgatgcgcgggtcgtcgatcatcttctccatccacgcggtgtagccgtcggcgggcaggccctcccacgtgtccttgaagtagcggttgtcgtagttaaagcgcacgggcaggcgcttgatgatgtcggccggcagctcggacgggtcggtctgccactgcttgccggtgtagttcttgatgaacgcctcatacagggggcggccgatgagctgaatgcccttgtcgttcaggttggccggatcggtgccggccagctcgcccgcctgctgttcaatcagggccttggcctcggccggcgtgtaatgcgcgtggaagaactggttgatggtgcccaggttgatgggcagcgggtagacctcgccgtcatgggtggcgtacacgcggtgcacatagttcgtgaagctcgtgaaacggttgacgtaatcccagacgcgcttgttggaggtgtggaacaggtgggcgccatacttgtggatttccgcgcccgtctcctcgtccatatacgagtaggcgttgccgccgatgtgatcgcggatatcgatgatgtgcacgcgggcgccggtgtgctccaccgcctgctgcgccaccgtcaggccgaacaggcccgcgccaacgataacgagatcgggatactgggtggtttcggaattgttcggcgcaccggccatagcaagcaacctttcacaggtcatgttcgttttacgaaagaccatgttactcggccaggagaaaatcaggcaatacgataaactatccgtctgcgcagctcggctaggaaacgtgccatactggatacgtccgcatatacaaagaggaagcacaagccttgccaaacaacgccattcccctcatttccgtgatcgtgccggtatacaacgccgaagactacctgcgctactgcgtggattccattctgcagcagtcgtatacgaacctcgaggtgattctggtggacgacggggccaaggattctagcccggccatctgcgatgagtatgcggcgcaggacagccgcgtcaccgtgatccatcaggaaaacggcggcatcgccaaggcccagaacaccggcctcgatgccgcgcatggcgagtacatcgcattctccgacaacgacgatatcctcgaccgccgcaatatcgaatacctgctgcacgcgctgcaaagcaccggggcggatatgagcaaagcccgctggcgccagttcggcgtctcccagctgggagaggtgtccaaagaggccgaagcaggcgcacaggcgcccggcacaatcaccgtgttcgagcatccgctcgccgcctaccagaccgtgttctgcaaaagcctgcgactgctcggcagcaagctcggccgcaacaccgaggcccgctacttcaacgaggcgaactggtgccgactgtacaagcgcgagctgtgggacggcctgcgattcccggagggccattacgcgcaggacatccgcatggcaggccccctgtacgcccgcatgggcaaagtggccgacatcgattgcgtgctctactactggcttcaggagcccggctcggtgacgcactcaaaacgaaccgccgcattctggcatgataacgtgctctccgcagccgaaaacttccagttcactctggagcaaggcatcaccccttgtaggaactacttcggcttgaccgccagcgtacgcgacgaaggaaaaggtctcaaggcgctcggctccgaagaactacatgacagcgactggcaaaaccatctcgatgacgtggccaccatgcgcgccctaatcagcaagctgagcatcggcgaacgcctgaaatgtgcagtgcttgccacgattcgctcctgcgaaaatgtggtatacgataaccgcatccactctatgaagtagaaaagtcaccgaatccagtaaacccctaccctcagttggctaggacgcgctggcgtacgtttctgtcatcgactacgaccagtcccagcaggaagaccggcaatatcggaagtacataacggccttggattccctcaaagacctcaaacctactcattgacgctagatcattccaggtcagtcccacaaagagcacaaacgctgctatctcagcagccgctattacgagagccagaatcaggaatcgatgtcttcccacccataaggctggtgtcatccgacccgtccagtgctgcttcaccgtatagaccgatgccgccagccaagccaccatcagaacagccgccattgcgacataccaagtcggcagataagcaaaagtcccgagaaatagcatggaatgtacgattttgccgatggtgagtgccggatgagacaacgcgacactcacattatgtgatacatccacctgcgccaacgaactgccgaacagcacgctccacggaagatacaacgctcccgtcagaaccgccgcaatccccacaagctccagcttgcgacgtacggtcattaccgcagaaggtaggaacagtaccgcgaccgacacaaacgcatagggaggtttttcacacgctaaggcccacgccagcacccccaataccgcagtgtacggaagagaaatcacacgtttgccctcggcagccacagcgatagccgccaccatgcaggccgaaagtgccacaatcataccgtcaatcatcaggctcgacgccacaaacgccgctggcggaataaccaacaacagcgccatcagcgatttccaacgcggcagcagcgcaatggcaatgcaccccataatcgcatacagaatgctgttggatattcgcgccgcctgccactgcgcgtacggccgcaagttcatcagcatggcgattttcaggccaatggcttggggcaagtaatcaagcggaaaatacgcgttagagcgattggtgtgtgtcccatccggcacaacgatgtgatcagccatcacatcatcagcactttgctgcgtttcccgcgacgaatcgccctgcgtcgccctactgattgactcaacaatcagaacgttcgcgaatcctggaatcgtcagcaaacgcgaatcaccctcaatggactgttgcttgacggtgttgccgtgcgcatcctttccctttgcaacaggattcaacgattgtcctgtggccaatgcgtacgtggacaacggatgcatatcaggatctggaatagtgagagggccaacctagacgatgaacatacaggcctgcagcgcgaacaacaccaggaagataaaatattgcacgcagtccccttcaagacatgtgccacatgcttcataacgccctaccttccggtcattcgtccacagtctaccgcacacacaccgcaagggcctaccaatacctggtcaatcccaacataattcgccacagcacatttagggatgactttatcttgggcttcattattacaatactcaagtacgttgtttatagaaatgagcgagcagagtgaacgacatccaaaacgatcaggaaccttcagcgcaagagtctggcacggatatgggaaaaaccgaagtcccagccgttccctcaaaacagaatgacgatcatcagagcaacaaattgccgctgcttttcgcgttgaactttagcatattgatggcttcaaagcccatggtcatgctggccaaagccatatctttcttgcacacactattgaagaagcgcccccgctgcccctacacgttgtacgtagtggtcatggcaatggttgacgccgcagcagtgctgttcatccaatggagcatgtacgaggaacccacatatgccgatccggatgcagtagatggcaccaccaaaatgttcaatagcgtggctgggcagctgacgaaattcgttgcccagatgtggatggaacacaactacgtctggctgctcaatttcctagtgctaggcatggtgtacctcgtactggtattcgttttgaaccgattctgggtggcgaccgccctattctccattctcacgtcaatctacgccgtggcgaatagcatcaaggtcgacctgcgcaacgaacccatcatcccttctgatttggggttcctctccagcggcaacggtggggaaatcacatcattcatccctaaagacagccagccactggtcaacggcaccattaccatgcttatctggctgactattatttgtctggcattgcagcttatcgatggtcgccgctgcgtgattccgttccactggtggcacccattccgcaatgtcaagaccatcatcggcaactgcacacgcatcatcgccgtagtactcagcgtttctctactgtggtcattcacttggaatctgggaatcaacggctcatggtcctacaaatgggcaaagagtctgggcgacaatcccctgctgtggagcacggttgttgacgccacctataacgggccaaccgtgggctttctgcggctggcacacgcaaaaaccatggataagcccaaggattacaacaaagagaccatggaggctttggctaaacgttataaggaaagcgcccaagccactaacgaggcacgtgccaataacctcaccgacagtactgtagtcatgattctttcggaatcattctccgacccaactcgcgtgccgggagttgaactcactgaagatccgatgccgaatattcacgcccttgaaggcattaccacttcaggcctgatgctttcgccgggcatcggtggaggcacagccaatatcgaacatcaggcattaacaggccttagcctggcgttgttcgacaattccatgcaatcgccttatcaggagcttgtcccgcaccagaaaacgccttatacgttcaaccaaatatggaatgatgcttacggcaagaatggttccgtggcgttccacccatacttcaagaacatgtatctgcgcgatagcaactacaagaaattcggtttcagcaagttgtattcgcttgatagcgaccccgcaatcgagcatcaggaccatatcgacagttcgccatacgtgagtgatgccgcctcgtatcagaacgttcttgattcaatcaacagcaatgatcacacccagttcattcagctggttaccatgcagaatcatgcgccctacaatgatttctacgcggacaaccagttcaaagaagccgatgtttcccaactctccgacgaagagaaacagtctatcgataattacgccaagggcatcagcctcaccgatcaggagactgcggactttttgaaccagctcaatgcagtcgataagccagtcaccgttatcttctacggcgatcatctgcccggcacctacagcaccgcgaccaaagacaagaacaatactcttgtcatgcatgagaccgattactttatatggtcaaatcaggcgtccgcgtctgccggtgtcaaactcgacccgcagaccgccggctatgtctcatcgaactatttcatggctttggctgctgaacatatgaatgccaaggtgtcaccttatctggaaatgctgacgcaggtgcaagcgcagattccggcaatcagccgactgatcagctccaacgattcctggggcgatggcagcaccgcctatctggatgctgaagggaaccgcgtcaagcgtaaggatctctccaaggaagccaagcaactactaaatgattaccgtctcgtgcaatacgatatgagtaagggtaagggctaccttaacgacgatggattctttgcagtcaagtaagcaaaaggggcatcagacggttgtccaatgccccacgaatcgattacttctctcgaacccaatagttgcctgatgtacgagacaggtttggattgtaatacggatcgttatctacgatttcggcatacttcttgcggaatttcgcagattcccgatccagtcgagccttctttttcttgctctcgatatcgtacccgcgcgtgacggactcgtagtggtatagctccacctcatgcgcccacacgatgtcacgtccaagctgttcgtgaatccgaatgcacagatcgacatcgttataagcaaccgccaaagcctcatcaaagccatgtaccgcgcggaagtcatcggccttcaccatgcagcacgccgccgtgatggcagagtaattgacgttttcgatgagtcggccgaagtagccaaaatctccacgggggaaaccgacctgaatgtgtccagccgctccgccaagaccgagcacgatacccgcgtgctgaatggtctcagtaggatagtacagctttgctcccacgacgccgattcgatccagctgcgcgaacgacaccattctggtcatccaagatgggctgatgacttcagtatcgtcgttgaggaacagcaagtaacgaccggaagctttttgagcagctatattgttaatccgcgagaagttgaacggaatgtcaatctcttccacacggaaacgatcaccaagcttcttggcaaaacgctcgtacaaatcctgcatatgcgggttgtcgctgccgttatcagcaatgatgatctcataattggggtagtccgtcttgtcaataattgagctgacacaacgttcgatattgtcgtacccgttcttcgtcgggatgattaccgacaccagctcgtcgccggagacatcgtaatgcacgttataaatgccattcggaccggcggaaaccacttcagcctgaataccgcgtctctcaaccgccgactgcaatgcgcgcaaaccagcgtcggatgtgtagctcttggcactgccgctggatgcggtagaggttgccaaagtgcgccaatggtagagtaccttcgcgatgtgctggatgcgatcaggggtggttttttctacgaagcgaagcaccagatcatagtcctgcgagccctcatagccgactcggaaaccaccaatctcatctacgatgctcttacggtacacaccaaaatgactgatgtagttggtgctcatcagcaaatcgggagaatagttcggcttgaaatgcgggtcgaagcggttcccctcttcgtcctctttgtcttcgtcactgtagataagatccgtgtccggatgctcattgagggtcttcactacctcaaacagtgcctggggagccagttcatcgtcattgtcaagcagaccgacgaactcccctgaggcctcttccaaagctgaattcgttgctctggaaatgtgcccgttttcagggcggaacaccactttgatgcgagaatcctgttgcgcataccgttcaagcagcggacgcacatgcggctcggacgaatgatcatcagccaggcacaactcccagttggaatatgactggttacgaaccgaatccacacacttttccagccacttcggctccacgttatataccggcaccagcagcgaaatcaacggctgatacgcaaacgaggcaatctcattgcgcactgccgtctcgtcgtaacgctctgttcgacgaatgaggttatggtacacgtgcttctgccaacgagggccccaatacttatccagcagacgccttgtggtacggcgaggatgccccagcagtgcgaccttgcgcaagaagttcgacaatccggcaagaacggacgacgactgaaccgggatgatgacttcctgactatccgtagaagtcctcaggcgcaaacgcagcttgtcgttcgccagttgcttacgcccgcccggtaccgatatttccgcacggaaaccaaggatcgaatccgggggaaccgtagttattgcattcacgtcaggacgaccgtaacggctcaggctgcgcaaactcgccacaggggattccaccagagagatatcgacctgttcaccgccgtgtatatcggcagcccatccgttaacgagcacagtagatccatcttgcttggcatccacctgatcaaggttgtatacaatgcctcgctgttcctcggaagcaggcgggaagcatgcagccgcaaacggatcaacgatctcgcgatgcatcttcagatattctgcaacgtcatccttattgattgacaagtgagtacgcttgcaatccgtgaaaaccgaatacggctcccaaagcacagtatgaccggactgctgatacatgcgagcgcaatagtcaataccgcgcagtcctgccgccaggcgcgtattgagtccgccgatttccacgaattccttgcgacgtaccagcatgcaatcttccgtggccgcgaacatgtcacgaggaagcagatccctgaagtagtagccgattccttcatcccaggaaccgcgcatttcaaaaggctcaccttgtttcaatgcccgaagggtaacgcccacattgagcacacgcttcttggcgtcaaataccttgccacccacaacgccaacagaagagggacgcgcataattcaccatttcgcgtagccatgtgccatcggtcggcttcatgccgtttaacagcacaatcaaatcttcggaacgacgctttgccacatcattcacggaatccgctgcagcagcaatcacagtgaacgacgggtaatccgtcatctctcgtagctgcttcacttgcgcatcagtcagagaagaagcaaccaccgcaaccgtcggggtgtaatcggcatagtcaatcttatacgtaccgagattgtcgagcattcgcacgtcaccggctattcctcgacgctccaaggccgcttcgattgccttgcgaccagcctcataggcatacatcttgcttcgggggtctccggccacagagcttgcaagggtgcgccagtggtacagcatctgcggaatatgatgaacgtgatgtgcctgctcggtggcacgcagcacgaagtcataatcctggctgccgtcgtattcgctgcgcaatgcgccaaccttgtccaacagcgcacggctcactaccacaaaatgagtgatgtagttatgccccagcaaaaggttcggcgagtaattcggcttaaagaacggatcaaagcgcttgccttgctcgttgatcttgtcttcatccgaatacacgaaatccgtatcgggctggtcattcagcgcacgaacgacttcaaacagcgcctgcggtgccagttcatcgtcattgtccatgaaaccgacgtaatcaccggtagcgagttctatggcagaattcgtcgccgccgcaatacgtccgttgctgtcacggaagacaattttgatgcgcgaatcgctcgcggcaagctcttccagcagcggcttgacgtgtgcagaaggcgaatggtcatcagccaggcacaactcccagttggagtaccactggttttgcatggattcaacgcatttgcgcagccagacctcgtccacgttgtacacaggtgtcaccacagagataagcggagtcttggaaaatgcggcaatgacaggctcagcttcttgctgggtcatcgtttcatggcgctgaatccacgaatcgtaaaaatccgtctcaccaacaacgcggcgtttcaccgcgtctcgcaaatccttcatcgcctcgcgattgccaaggtgcgcggcataaaacatgagcctgtgcacgcgggtgctgatgtattgcatgcggaatcgactcatcaaacgctgaacattgatgtgccttgtcatggtcgtgccaggcgcctgacacatcaagtcgaaattctgcactccctgaggaataacaatcgtgaagcctgcttgatcgctgggatccaatccatacgtcttttccagatcaacacgagtattccgcgataccgtcacacccatgccggctaccgccaacggcagggaggtctgcctcatcttgtcgaccgcccagccggtcactatagtccgagactgttccccaaccttgacgttctctactttttcgactgttacctgatatgtacgatcattcaacagcgtcagcatgcttgttctgtccttatcatctcagcagacgaattaatcgattgtcacttgcaccgtattgtccgggttcaccactgacatcacttccgaggcggatcccttgatgtggaatctgcaggcattctccgccaactgcaaacgctcagagtccgtctgcagagcaatacagatgcggaaatcgccaaatgcgagcacattcttcaccgcaaattcggccgtatgcttaccggctgaaatcttatcgtcctcggagccaaacggcatggaaagcacgggaacattgcggccatcaaacacatcgatgaacagctggttcgcaggaaccggacgatcgcattcgaagtcaacattcatggtgaagtcctcgcgcgtatccaggaatttctgcgtctcgccatcgacggcaacgtttacggcattcacggtcacggcattgcgaatagccgcttccttttgctgtgcctccactacttcgcgcgggggaaggaacgaatccgagtaagcatcggcaatctcgtcagggtcgccgatcttcgcaatatagccgtcctgaatgagcattgcccgatcgcaatacctgcgcacatccggcatggagtgggtgaccagaataaccgtcttcttgttgcgcttcgcctcaaagaaatagttctggcacttcttctggaaagcttcatcgcccacggcaagcacctcatcaagaacgaggatgtcgccctgcgatttaatcgccacagagaatgccagacgcacctgcataccgctggagtagttcttcagcttctgttccatgaagtcgccgagctcggcgaactccacgatgtcgtcatacatggcatcaatctcgtcgttggagaaaccaagcatggcaccattgagatatacgttctcgcggccagtcagttcaggattgaatccaacacccaactcaatgaagggcacgagtttgccgtccacctcgattgtgcctgtattcggcgtgtaaatctgggaaatcagtttcagcagagtggatttaccagagccgttcttaccgacaatgccgaaaaactcaccttgcttgatatcaaaggtgatgtctttcagcacttcctgcgtacggtacccgcgaatgccgcggagccaattgaacagcatgttcttcaggctgccagcacgttcaaccggaagtttgaagttcttggatacgtgctccaccttgagcgccaccggtcggtcagcgttcttctgctccatcgctttgtccatcttgttcatcgtcacaccaactccgcgaagtactgggatttaacggtgaaatacttcaaaccacccaagaagatcagtacagaaagaataatcggccagcactgcaggaatgggttatccacccactgccaaatggtctgatttgcagggctaatcatcacatgacgcgcatcctgaacgatttgcgccaccgggttgagaatcagatcgagccgggcaaatatcggaccatactcgcccgcctttgaagtgataagggaaatagggtagataataggcgtggcatagaatccagcctgcattaccacttcccagatggggttcaagtcacgcagattgacatacacggcactgaggaagaaagcgattcccaacgacagcatatacagctcaagcaccagaggaaccatcagcaaccacgaccaggtaagactgacgccgttaatcagagcaaataccactaccacaacaaaattgatgccgaagttaatcatggcactcatagatgaggcaatgacaatcacatacttcgagaagtgaatcttacgcagcagatcaccgtgtcccacaatcgacatcatgccgccggtagtggtttcattgaagaaattccacatgatgatgcccagaagaagagccacagagaagtgcggcacatcagcaccgaacttcaggaatcggacgaacacgagatacatgatggtgaacagcatcagtggcttgagcacagaccagatgtatcccaagaaggactgctggtagcgaagcttgaagtcggtgctgaccatcgccttcagtaataggcggttcttcctggtgaagatttccgtgatgttcaaaattgctcctcaaatacaacaaacccgcatattttatcagcgcggactaacaatctatgcgggttttcagtgaaggtctatcgatccatcggtttgacgatgaacttattatccgccacatccttcagatgcttgccatacgggctcttgccgtacttcacagcggcctccatcagctcatcacgagtaatccaaccgttctcaaaagcgatctcttcggcaacggcgatcggcaggccctgagcacgctgcacggtgcgcacgaattcgcctgcctcatacagggagtccatggtaccggtatccagccaggcatagccgcggccaagcgtctgcacgttgagggtgccgtcttccaagtacatcttgttcagatcggtaatctccagctcgccacggggagacggtttgacctgcttggcgaactcggtgacgcgttcgtcgtagaagtacaggccggtcaccgcatagttgctggccgggtgctccggcttctcaacgatggagatggccttcttgttctcatcgaattcgaccacgccgtatcgctcaggatcgtcgacgtagtagccgaacactgtggcaccatgttccaccgtggcggccttgcgcagtgtcctgcccaaaccgttgccgtagaagatgttgtcgccgagcaccagcgcgcacggctcaccatcgatgaactcctcgccgaggatgaatgcctgggccaggccatccggggaaggctgcaccttgtaagagaagctcacaccatactgggagccgtctcccaacaaacgttcgaagttcggcagatccttcggcgtggagatgatcagaatgtcacggatgcccgccatcatcagcacgctcaacgggtagtaaatcatcggcttgtcatacacgggaagcagctgcttcgaggtcaccgtggtcagagggtacagtctcgtgcccgaacctccagcgagaataatgcctttcatgaaaaacctgctttccacaacgttttactcgttattcgtctacaaacgtattcagcttagctaactcttattcaaaatgaaaaaccgcgcagagagcctgcgcggttttatcacttgaggtcaactgttatgaacaactatcagccgagttccttctccacgtaggtcttgagggtctcttcccagtcggcgggcacgtatccggcttcaccgatcttggcaagatccagtgcggagttgaccggacgcggagataccgggttggtcgcgttcgcgaagtattcggcggtgctgatgggcttgaccttgctgccgttgccgttcgtcaggtcgaacacctcggccgcgatatcagcccaggacttcaccgcaccggaaccggtcaagttgtaggtgccgtagggggcgtggctatcgagcaggtggaaaatcgcctcggccatgtccttggtgaaggtcaggcgaccgtactggtcgtccaccacggtgacctgatccagcttgtcggccgggtcggcgaccttgttggacagcatcatcatggtcttcacgaagttgtgcccctcgccgatcacccagctggaacgcaggatgtaatgctcgggtgcgttggccacggcgatgtcgcccgcggccttggtctggccgtacacaccgagcggggcgaacgcctccgtctccgtgtgttccttggcggtgccgtcgaacacataatccgaactcacgtgcacgagggtgatgtggtggtccttggccaccttggccagcagagccggaccctgggcattcgccttccacgcgatcggacggccttcggcggtctcggccttgtcaacggccgtgtaggcaccggcgttgatgatcgtgccgtacaggctccaatcgtatgcctcgtatgccttcgggtcagagaagtcgaactcgtcgatgtccgtgtactcgaagccctgaagatcatgggcctcggcgtaggcgcgaatcgcgtggcccagctggccgttgcagcccgtcaccagggtgcgcttgggagccatgggcttggcgtccttgagcatcgggtggtgcagatcggcctcggagcgctcggactcctccagcggaatcggccactggatgttcagttccggatccgcaaggttcacgaacgtgtaggtcttcttctgttcgagcgaccagtgcgcgttcaccagatacgtgtacacggtgccgtcctgcagtgcctggaagctgttgcccacgccgcgaggcacgtagattgccttggacggatccaaacgggtcgtgtacacctggccaaagctctcgcccgggcgcaggtcaacccacgcgccgaagatctcgccggccgcgatgctgatgtacttgtcccacggctccgcatggataccgcgagtgacacccttggtggcgttgtagctgatgttgttctgcaccgggccgaagtccggcagacccagacccatcatcttggcgcgctgccagttctccttgaaccagccgcggttgtcgccgtgcaccggcaggtcgaacaccagaaggcctgggatgttcgtcttctcgaccttcagttccttctcgaattcaaatgccatgatcgaatcactgtccctgttgcttgtacttggcttcggtggcggccttggccggctcccaccaggcgcggttgtccgtgtaccacttgatggtctgctccaggcccttctggaagtccgtgtgcgtcggcttccagccgagctcggtctgaagctttgtgctgtcgatcgcgtagcggcggtcgtggccgggacggtccttgacccagtcgaagtcgtccgggctcttgcccatcacggtcaggatgtcgcgcagcaccgtgatgttgttgcgttcgccgttcgcgccgatcagatacgtctcgcccaggcggcccttggtcaggatggtccacacgcccgtggagtggtcgtccgtgtggatccagtcgcgcacgttctccccgttgccgtacagcttcgggcgcaatccctcgaggatgttcgtgatctgacggggaatgaacttctccacatgctggtacgggccgtagttgttcgagcagttggagatggtggcgcggatgccgaacgtgcggtgccatgcgcgcaccagcaggtcggagctcgccttggtggagctgtacgggctggacggatggtacggggtctgctccgtgaacttcgccggatcgtccagggccaggtcgccgtacacctcgtcggtgctcacgtgatggtagcgcacgtcgtacttgcgggccgcctccagcaggcggaacgtgccctccacgttcgtcttcaggaacggctccgggttcgcgatgctgttgtcattgtgagactccgccgcgtaatgcacgatcgcatcatgacccggcacgattttgtcgagcagctccgcatcgcagatgttcccgtgcacgaactccacacggtcgcccagaatggacttgatgttctccaggttgcctgcatacgtcaacgcatccagcaccgtgacatgcacgtccggatggttgttgtacacgtaatgaacgaaattcgaaccgataaaaccacaaccaccggtcacaatgatattatggggagtaaacaattcttcagccataacttacagcataccgtcaggcataccgagatggcgagcaatcgggaaaagatactgctactattgctgaattatccgatacggagttcgtccatcaatcgtttcgccgatgcgttcaaacgagtacccgtcgaactgcatctcgtccagcttctggggggaaagcacattgttcaccccgagcttgcgcaattgcgccggcgtgacatgcacggtaaacgaatcgggcgataccagggtaaatacatccgccgcttcttgttccaccacgttcacggaaacgaatgcataccggttgtatatctcttcccatcggccgttcggatccagtttcttccacgtggcaaggtcaggtgtgacctccaacgcattcagcgtgtgcactccattggccaccgcgagattcgccagctgggagccgaacgcatcatcgatagcccacataccttgatacttggtctgcagcgactgcacctgttgcatcaacggttgcttggtcaggggtgcgctgccatactgtacgggattcacggatagtcctgataccaataatccgatggatacaatcggtgccacaacagtacgagcaattacgccattgctgagaacagcaaaactcagcagacccactatgacgaaacacaccataaccaatagacgcccgatatacggcagatacatcccatgattcgtccacgccagtactgcggcgaacacggaagctgccagtaacgactgcttccaagaaagcccaccctctgtaatagccaccgcacgaaccaatatggcaatattcgcaacgcccaaaaccaccacgcatcggccgctggtcacagaggtcagcatcaatattttcgagagccacagcggcacgcccacacaggcgaatattgagaacaacgcgatgaccgcaataagacaaacgctgagtatgtcaactttcttccgcttgatcatgccgaagagagcaaggattattccgagcgggaacaaatccacaaaacgcgatgcctcaaccatattggttgccgcagaatcaacggcataatccttgaacgggaaaaagagagtgcccacggacgatatcagcgatagagggggcaatcctcctccagtggattgcctcgcacccggatatgccgtgtgcagcatggattgaatcgtaccccatgaagtcataactgcagaaccgagaattacacagaataatgcaatttcgcctaccaaaatcacgacatcttttcgagaaaccctgatttgcccccagtgccgtataacgacccaaagaatgagcactgcgagaagatagcccagcgaaatctgccatgcggggtacaacgtcagcgcgaacatccctgcgcatatcaggatcactgcggcatatgcggccctatggccggtttcagtgtcaccaaggtaccggtcaaagcacacgatggacacgaatatcgcgataagcatctcaggcaacgcattgaccgcaaaccaccattgcaccaacggggcacatgcaatgaggatggcgccaacgaacgctacacccttgtgcttctcctgccggtgatcattgctgatgcagaggaagaactcatacgcggctaagaaaagcaccactaggcgcgcagaccaataaaaagcaagccctcggctactgccaaagaggatatacccccaatggaatggtcgaaatatctcggcgagagccagcacaggtgcatctttgacgatgaacatgtccgccggtttattgccaaacaaatcattaaagtagctatacccggagtagctttgcgaaaaagccagaggagtgcccaccacatattcgtcggttcgtattatgcgcgggattccccacaccacgtccgtggacatgtcatgccccagccagtaattccacatgcctaaggatgagccgttgacattgagaatgaccgcaaaaagaattatgccgcaaccaatcgcaaaacgatacctatgaactatatgcccgatggcacgaaaaccatataagaaacaaaaccacagaagtagaaaaggtacaaataagaccaatactcgtaataaaacgatgtagacttgcggagcgacaccaaaggtaagcttaaaaatatgctgctgtatgattggagcacccagtgcgagaattatgctgcacgccaatgcgcctataatggcaccgaccaatttcctccacctgacggaacgcactaaggtttttcttttttcagccacaatacttaccatcagttctcctcgacaacagaaaacatctagaacatcctacaaaaaggaagcccgtcatgcacatataccaccttcctcagcaggtagtgctcgagtttcttgtgcactttgttcctcgccagtccctgtggcgataatcagttcgctgtctgtacgctctcatcgaaccttgacatgttgaggtagcatcgtgtcggtcactcgttggaagtcacgtaacgcgcacatatgagcatcaacgtgctccgtccgtcgagggagctgctggccccaccgttttagtcaatccggtgtttcgtatgggagtctcgtcttgtctaacgacaaaaaacgcgcatagggcataggacacgagtcacatcctttcaactcaagctcagaccaagtgcacaaaatttcagacgttagggggtgcggacggaaagttggacgcttgggcgtccggattggagtccgcatgttttcgatggaggatcggcgcagggccgttgacctgtatttcacggagagcatgaccatcaggaaggtcgtcgccaagctcggctacccgtccgagggcgcgctggcgaaatggcttcgcgaggacccgcgctacacgggcgcgtgcaggcgttcgtatacgctggaatgcaagacgaacgcggccagacgcgcgctcgagggcgagcccctcgcccgtgtggcgcgcgacgcgggctgcacgccgacgagcgtgtaccagtggatgcgccgctaccggagcgaggggatactaggactgatgaacggaagaaacgcgccgatgccggccgaaccgatgcccacggccggcgatgacgtggaggagctgcgtcggcaggtggaggccctgcggttggagaacgcggtgatgagggagacgatcggggttttaaaagccgacgactgtgttgggggtggtgccgttttcttggactgtgatccgaggaggagacggccatggcgaagtacacgagggaacagcggcaacgcgcggtcgagttgtatgtgaaatacgagtgctgcgcggcggacgtgatccgcgagctggggtatcccagccgggaggcgttgcgcatgtggcaccgggaccggcccgacgaacaggagacgggcgtgtcctcgcagcgtggtgaacggtatgcgcgctacacggaggagcagaagcgtgcgtccgtggaccattatctgacgcatgggcggcgtgcgagccgcacgatgcgtcagatggggtatccgagcaaagaggcgcttgcctcgtggatcgacgagctcgcgccgggcgaacgccggattcgccgtggcccggttcccggggaattgaaacgggatgcggtcctgaaggtcgcgtccggcgaattgagttcgcgcgaggccgcggaggcggtgggtgtggattcgtcggtcgtgcgaaaccggaagcgtcaactgctcggagacgcgaaaggactcatggtggcgaagagggaaccggaacgcggggattcctcgcagcaggacaatccggacgcgctgcgcggcgagatcgccacgttgcgcgccgacctcgagcgtctgcgctgtatttcgtcaagtcggtgtttcgtgtttagtcatgtatttttttcgggtttaggcagttgcatgcattttccttatttttccggttgcgcggaggtgttcctgccgaacatgagggcctcactgacgcggcggctctggccggtgaactcgaggagccgcccgtggtgcacgatgcggtcgatgatcgctgcggcgagtttgtcgtccgcgaagaccgtgccccatttactgaactcgatgttcgtggtgaatatgatgctccgtctttcgtagctgcccgcgatgatccggtagagcaggcgcgccccgtcgatgtcgaagggtacgtagccgaactcgtccagtatgatcaggtcggcacggccgatgtcccggagcatcgtctcgagcgtgccgtcgcgtttggccttgcccagctggaggacgagctcggcggtctgatggaaccgcacgcccagccccatgtcgatcgccttcatgcccagcccgatcgcgagatgtgtctttccgcgcccggtcttgccgtagaacaccaggtcctgcgcgcgcgggatgaaaccgagcctgtgtctgttcaatagaaagtgggccgtgtgagcgtgtggatgtcttccatgtgagcggcaggttctggtccacttcagcgtgtggtgagaaacgaacaccggcccgtcctgcctggactagtttcccgagttgaaagtcaaaccgttcggttttctcgggaaaggaaaggaatgacggtaccggtgtccgtacaacaacgtatcagggtgcttgacgcgcatggcatgtcatggaggagcatcgcgaaagaggtgggcgtggcccgcgacacggtcgcgaagtacgccgggagggaggattgctctcccggaccggagcgctccgtatcgcggccgtcgaagctcgatccgttcagggcgacggtggacgggtggctgcaggcggaccggttcatgccccgcaagcagcggcacaccgccaagcgcgtgtacgacagactcgtgtcggagaagggctacgagggctcgtattcgccggtgcagcggtacgtgaaacggtggcgcgaggagcatcgcctcccgtcggacgggtatctggagctcaagtggcatccgggcgaggcgcaggtcgatttcggcatggcgcaggccgtggtcggcggggaccgggtcgacgtgcattgcctggtcgtcacgttcccgtattcgaacatgcgctactgcgtggccctgcccggggagaacgccgaatgcgtgtgcgcggggctgcgcacggtgttcgagcacataggcgcggtccccctgacgctggtgcttgacaacgccaccggcgccggccatcggatcgcgtgggacaaggtcaccgtcgtgcacgtgttcgaactgttcgtggagcattaccggctggagaccaggttctgcaacccgaactcgggcaacgagaagggcagcgtggagaacgcggtcgggttcctgcgccgcaacatcatggtgcccatgctcaacgcagagtcccacggccaactgacccggtacatgctggagcgttgcgacgcgatggccaaggagacgcattaccgcaagggcgcgccgatcggcggcctgttcgccggtgagaagatggatatgcagccgcttcccgccaagccgtacgacgcgatccgttgggaggtgaggaaggccgacaaggacgggcgtgtgcagatcgacggcaactactacctcgccggcccctcgtggcgcggctggactctcgacgtgggtctgcgcgcgttcgacgtgacgatccgcacccaggacggacgcacctgtgccagactgccgcgcgtgtacggggattcgccggccacggtgcgcaaccccgccacgctcctgcccgcgttgagccgcaagacccacgcatggaccgattccaccatccgtgacgatttccccgacaaactcaggatcgccatcgaccgcatggacgccaagacacgcaggaccacgttccgcgtcatcgccaaggccagcgccgcgtccggcttcgaggccgccgtccgggccggagagcacctggtcgaacaggggcacgcgatcgacgaggccagtgtgaccaccatggcccggcgcatcgccgccggcgagaagccgtacgagcagtcggtacccgacctgaccggatacgacgtgttcatgaaaccccgacagccatgggaaaggaaggaggcctgaccatgggaacccaccgtccgccggtcgtcatgcccgacatgaaacgcaggcgcgcgtccaccggcgaaagaatcgcaacgatcatgaccctggccagacggctgcctctgacccgccaggtcctcgccgaccagctcgcggacgcgacccccagccagatggaattcatggaatcgtggatgaacgccgagatcgaatccagggaacgctccaaacgctcacgcctgctcaaggccgccggattccccgccgacaaggagctcggcggctacgactggaccccgatccgcttccccgtcgactacgggcgcgggcagatcacgaccctcgacttcatcgccggccacgacgacctcgtcctgttcggccctcccggcaccggcaagacccacctcgccatcgcgctcggcaggaacgcatgccgcaagggcatacccgcacgctacttcaccgccgcaggcctggtcatgcggctcctcagggcccaatcggacaaccggctcgaccgggaactcgccgcgatcggcaggaccccgctgctcgtcatcgacgaactcggctacgtgcccatcgacgaggacggcagcaggctcctgttccaggtcgtcaccaacgcgtacgagacccagagcatcatctacaccaccaacatcgagttcagcggatggggcaggatcttcggcgaccccaacatggccgccgcgatcatcgaccgcaccgtccaccacggacggatgatccgcttcgagggcgaatcctggcgcaagacccacgccctcatgcaataaccaatgcaataaccaacaaccagcaggaccggccaacgccgaaacggcctgaaacccgccgctcacatggactaaaagaaacgccgaaacggcctactccaacttgacaaaacacaccgagccctaggagctcatcgagcatgtagccgtcggggagcctgacgttcgtgaagtcgtagccgtcgagacccttgacgacggggaaccgggcgcggcgcaggagcctgtcgtgcttcgcgcgttccctgttcgccagttccgtgtcgagcaggcggtggacggcgtcgacctggcggggcgtggcccagccggcgaattcgtcgatgctcgccttggagatgaacagcttgcgggccttctcgtagagcccttcgtccgtcttcgtgttcatcgcccgccttcctgcacgccgacgtccgcggtgaacgcgatgtcgtattcactcagatccggcctgtcatcgtcgtattcgatacccgccacgccctcggcgagcctggccgcgagcagtgtgacaccggcgcggtccgccccgccggtcgattcgaggatggaaagcatcgcctcgaccgcgttcgcccacccggattccctgtcaacgcgtttgagggtctgcagcgcctcgttgcgtgtctgtctgtcctgccgatccagccattcccgcaacgggtccggcaacgcgtcacgtacccggctgttgggccaggacgcgggcttgttgcacagcagcgccaactgcatggacgggtcctcgctgttcgtgctggcctggccgtacgcccgaggatgggtcgccagatgcttgcccgacgagtcgaggacctcgacctcgagcgcgcggaggcccacgatcacccctctgcccgcgttcgcccggtccgcggaataacgatgccgtccctcgagcgtgaccacgccgtaccggtcggccttcatatgccgccacgtgaccacgtcgaaacgcttcccgggcaacggcagcagcgccgcacggtcctcggagaacaggccacgttcctccgtgtccttgcggtaatgcggtttcgtggccagctccaggcaccggtccggcagcccggcgttaaagttctccaggctccatacgctcggccggggcacgaacagcttgcgccgcaccatgccgaccttggactccaccgcgcccttctcatgaccggaatacgggttgcagaacgaacaatcgaacccgtaatgcgcctggaaggcctggaacaggtgcgtcaggcgcggctcgcgctccccgtaccccttatggcccacgccggcggcgttatcgaacacgatccgctccggcacaccgcccagccactcgaacaggttgcgcaacgccaggcacgtgcactcagcgttctcgcccggcatcaactgcaccagaccgacgttcgaatacgggaaatcaagcacgaaatgatgcatccgctgcaccacgccgcgcaacagcacgtcgacctcgccgaaatcggcctgcgcctcgcctggatgccataccagatccatgaacgcctcatcacgctccgccgcgaactcacgcctgagccgcgccaccgcccgcgtcaccgtggacagggagacctccgcgccatgctcgtccctcaaccgctcccagatcctggtcgcggtatgccgctgcttgcgccagttcgcgcgatcctccgcgagccactgctcgatcacgggcagatacgggtcgatcaccgacgcgcgcggctttctcaccgacggcacggccgacagatcctccttcgcgaggtacttacgcaccgtcggctcgctgacatgtgttttccgcgcgatcgacgcgacggattccccgttccgccgcaaacgacggatagactgtacttggggcatgctgatcataatcctttccggtcctttctggcggagatacaagcaccatccagttaagaccattccgtggtcggcatgctctgcctaaacccgaaaaatcatcgtgactaaacccgcaacaactaattgaacacaaacactgcgcgccgaacagcgggccatggagatccggctggcgatcatgaagggtgcggcggaactggtgggaaaagagccgggcgcagacccggacaacctgacaagccgagagaagacgaccctgatcaaggacatcagtgagacgttgggcgtgagcgcggagagactgccgaaggaggtcggcatcgcgcgcagcacgtaccactaccagttgaaggccatgcgccggccggacaagaacgcgaacctcctgtccctggtgcgcgaggcgttcgggaacagcaggaggcgttacgggtacaagcgcatccacctcgagctcaaaagcgcgggcatcatcgtgtcggccaagcgcatcatgcgcctgatgaccaaccacggcatggtccccgtgctcaagagcgcgaagcgctacagttcgtacaagggcgagatcggcggcgcacccgcgaatcccgtgaaccgcgacttccacgccaccgcgccgaaccggctgtgggtcacggacatcaccgagttcaggatcccggcgggcaaggtgtacctgtcgccggtcatcgactgccacgacggcatgcccgtcgcctggacgatcggcacgagccccaacgccgccctggccaacggcatgcttcgcgacgcgtgcgccacgctcaagcccggcgagacgccgatcatccactcggattaagccggttttgttgttaagccggggaacggttcggggtcttggtggctggccgtgtcccatgtggtttcccggcttaacgttccgggttatttgagggtgtgtagttgtcggagtcgttgctcgctgagccatgtctccttggaggggtcggggccggggttggccgcatcgacggctttgcgcatcatgtcgagggtcgcgaacgcgtagaacgcgctggttgtgctcatgctttcgtggccgagcagttgcatgatgagcggtagcggcacgccctgttggtagaggtccatggcgcgggtccggcggatcaggtggcagtggacgcgttcgggcatggacgggcacgtcccgcggcgtgctctggccgccgcggttttgaggatctcgtcgatccggtccacggagagcggctggatggcgccgttcctcgtcgagtggaacaacggcctgtcgccgtcgcgcatggacggtccgggatggaattcctcgaggtaggcggccaggtgggttcgtgtcctttctcccaggggcacgacccggctcttgccgcgtttgccggtgagcgtgaccctggccggcttatccatacccacgtccgcgatggtcagtgcggcgagttcgccgatcctggcggcggtgtcgtacatgaggatcaggagcatgcggttcctgcgcgatttggcgtcgccggtgccccatgcggtcagcaacgctttggtgtgctcctccccgaggtggtcgacgggtttgcgcgcgggtggtttgacacgtatgccggccgcgtcgttgcccagcgcggtcaatgccgggtgttcgaggcccgcgtggtcgaggaacacgcgcatcgtcgtcatcctcagcatgatggtgcggtccgagtacccgcgctcggtccgcatccattcgacccaccggcccaggcgcgcccggtcgaaatgcccgaaaccgatgtggctgcgctgcgtgccttccgtggtttcgagccatcggacgtaggattccaggccgatgcggtacgcctcgacggtcttcggcgagctgccccgcaccttgggcagccagtggtgcagccagtcgcgcgcgactcgccagaagtccggttcaccggagctggcggccgttttccttgccttgctcatggttcctccgtttccgggaccacgcgttcggcgtcggcgacgaggtccgcgtatccgtccatgaaatcggggctggcgtgcacgtagtagagggtgctgtcgatgccggcgtgtcccatgtaggccgccagatagggcagcatcgccatcacgtccacgccgtcgcgagtccaccgctcgatgttcgcgaacgcgaaccggtgccggaaatcatagggcctgggccgtttgccggcttgtggccactcgagcccggcccgcgtccagacgcggcggaacaccacgccgggcatgcccggggagaccggattgccggtggaggtgacgaagaacgcgggacggtcgtctccgaagcgttcgcgggaccgttggtcgcattccagcagttcggcggcgacctcgtcgcccacgggcagcctgcggctgcgaccggccttggaatcgaccacgtcgatggaacgggccttgtggtcgacgtgcccgacggcgagtctcctgacctctcgggtgcgcagcccgcagcaggccatgagcatgaagaacgcgcgagactgccacgcccacggcgacggagactccaacgttcccgcggcccgcaggaacagggcggcctcgcggtccgtcagcaggtacggcgtcggacgcggggatccggccttccactggtcggagagcacgtacgcgtcgggatcgtgggccagtcgcatccacctgccgaagtccctgatgtacgagaaccacgagcggcaacccccgggattcgcgtcgatcctatgggcgatccatcgctccacgacgccccgctccagacgcacggccccgtgttcgaggcaatgccggtcgaacgagcgcaggacctggacgcgggtggcgccatgcctgcccatggacgccttgaagcggatgtactcctccaattcgccggcgagcgggccgacgaatccgtgttccgtgggtctcatgacgatccgccttccggcacgggcagcacgcacgcgagcattcccccgcggtgcgtggccatgtagacgcgtgtggaatcggggtcggcgtggccaagcaccgcgctgatcgtcggcaacggcgtggccgcctccagcatcctcgtcgccgcgttgcgccgcaacagcctggaaccgccccggcgtccgagcccggcgtgccgcatgacacggctgatcgcctcgtacaccgatgaatgaccccgaagcgcgacatggggcgccttgtaccgcacgaacacacggtcgtcgtcggtggcgggcctttcgtccaacagccaggacgccagcctcgcggccagcggtcccgtcatcggcacggtcaacggattgcccgtctttcgctgcaccagacctatgctcatggaatcccaatccacgtcggcgatcctcagaccgatcacatcgcatgccctcagcccgcacgtcagcgacagcagggtgatcgccgcgtccctcgacggcaccgaccgcgaggcgcacgcctccagcaagcggcggtgctcgtcgtcgggcaacgttcccgcgatcgcgtgggtcctgcgtatgccggccaggccgatcgcgtccgccaggtcatcccgcccgagccatctgaacaacgggcgcaggtccgacgcggcgtgccgcatcgacgactccgaccagcgtgaacgcagcccggccaggaaccccagcacatgcgagccatccgaaccgtccaacgacacgaccccatgagattccagccacgtgaggaacaagcccgccatccgacggtaatgccccaccgtcgccgaagccagtcccgaaccggcgagatacgcctcccaacgctccatgaccacggccaaacccggaaccaccggctccgcaagcctgctcctgcgccacttgcccaggtccaccgaaccggaccgcagatacgagtcgcacaaacgcgccagcctgccgtaatcgaaccaccgctgcctgctgaaaccgcccgtccgctcactgaaggtcgacgcggcgaaccccgcgcccaacccacgcgtgtacaccgcatccgggcctccggcgtaccgttccaacgccctgatggacttgcggtactggcctatggtggattccatataaccggccccgtaaagcgcgcggaccacctcgcccgcgacatggccaaccgtcgtctcacccatggcaaactccttcgttcgaatcaaatgggacaagacgaacataacccggaacgttaagccgggaaaccacatgggacacggccagccaccaagaccccgaaccgttccccggcttaacaacaaaaccggcttaatccgagttaaaccgatgtcggtttaactcggaccgtggatgccattaccggtggccggaatggatccgcatctgcgccgagcacgggctgacccggtcgatgagcgcgaagggctgttcgccggacaatgcggccgcggaggggttcttcggccgtctcaagcaggagttcttccacaagaggagcttccagggcgtgacgatcgacgagttcaccgcgatgctcgacgagtacatggtctggtaccgcgacaagcgcatcaagaccgaatacggcatgagcatcatggacaaacgcatccagctcgggctcgtcgcctgaaaccatccggtacactgaccaacgaccatacagacaacgaagtccaacaaaacgtcaccacccccaaaacctcaacttcctattgaacaaaaacaggtcgatgagcgccaagggatgcagcccggacaatgcggcggccgaggggttcttcggcaggctcaagaacgagttcttctacgggcgggactggaggggcgtgggctacgaggagttccgcgaacgcttatccacctacctgacccacctacaatgagactaggatcaagaagtcactggactggatgagccccgcgcaataccgcaaacaccttggactggctacctgaccgtccaaaaaaacatccgcgcccccttattccacatcaatcgctctcagcaatatcagttaccacgaacgatagcccttcatgttcaataatcggcgaaacaccgacaaaaaacgctggttctcgccgtgtgtaaactagttgtgcacacggttgacataggacatgattaaccacgaggttgattacgaacaccatggtataatattaatttgtcagaaagtgacgcggagaaaaaacagatgactcgttctactactagaatgcaacaaatatccacttctatatatagaaaatataagctcagcgtactttatgcatcattaaccatccctgttggaattatactcatttttttcgataaagctccatcgagaaatgattttcttgatcattggaatagagctgagcaaattgccgctggccagtttacggcaatcccagatccatcaggaaccggcaactatggtgcaatcaataaagatggagtatttgaggccttcaataatactgccatcaattcaccttttacttattttccaagtgtattcggtggtggacatctaagaatcagctgccttcttacattattattttccacgctatttgtatgtattgctatatcactagcaaagcagtacgacacgattatattcggaatcgcaattcttccgattttctttctttcctctatatacccaacggcagatgccatcacaaattcaatttcactattatgggttgctttcattttatagctttaccagcaagagaaattatcatggcataatatattagcaacttgtcttttggcattgttcctgggtcaaattaaaatgacctgcataattctcatactactgattgcgcttcccatgattcgacagtaccagttgaatcataaaatcgactacaggtttgtaattcccgtcataatttccttgtcttcagccatatgttggatgcaggctacaaaaaacgtgcctcccagtgcagtaagtacagtcgaacaatataaagaggcaaaattgactgtgctgcatcatcccggtgagattcttaaaagccttggaatatctctcattaaccctttggatttaaccaacgataagcacgataccggccgcaacatccaattctttactggagctgaatatacacagttaccatttgcggtcatgatgcctattctttttgccgttgttttacttgttctatatcgaaacaagaatctccctgagttccacatagctgagattacagccactgcagcaataatcattcttttctacactttaacttgcacaggtctcatcgtatcctggggaggagtcgcacttggcagttatgcaagcggtctccaaagtaggtacttcatccccatttatgcccttgtctgtctgctaatccccaatctaggcatactcgttatcgataggaagaaaatccgtatcttcatatctgccttgatcggatggtcttattccggactattgctggctcacctttttgtattcccttggcagctctgagaacgattacttaatgttttcgggctatcccaaacgttaggatattttacatgtttgataattgcccaacccattccgttgcggttctactaccgtgctacaacgaggaggtcacgatcggcaatgtggtgcgcgacttcagggccgcgctgccgggcgcgaccatctacgtgtacgacaacaacagcaccgaccacaccgccgagatcgcccggaacgcgggtgccgtcgtgcgccgcgagccccgccagggcaagggcaacgtgatccgcgccatgttcgaggacatcgacgcggacgtgtacgtcatggccgacggtgacgacacctacccggccgacgcggccccggccatggtcgccaaggtgctcgacggctacgacatggtcatcggcgaccggctttcctccacctacttccaggagaacaagcggcccttccacaacttcggcaaccggctggtccgcagttccatcaacggcctgttcaatgcgcatgtcaccgatatcatgaccggataccgggcgttcagcttcacgttcgtcaagacctatcccgtgctttcacacggcttcgaggtcgagaccgagatgaccatccactcgctgaacaacaacctgcgtctctacgagatgcccgtccagtaccgggaccggcccgccggatcggtatccaagctcgacaccgtgggcgacggcatcaaggtcatgagcaccatattccgcatgatccgcgaatacaagcccctgcccttcttcggcaccatcggccttctcatcggcatcgtcggcatcgcgctctgcggaggggtgacctacgagttcgccgcgaccggatccgtggcccacttccccacactcatcggcgccatcatgctcgtcatcgtcggcctgctgctgttcgtcaccggaataatcctcgacgtcatcgccaagaacgaccgcaagacctacatcaccgacaccaaccaattcgcatacctcaggcgacacttcactaagcgtcaacgttctgaatagagcatggaaacgctcttatatactgatgagccgtccgcaactagattgacttgttgcggacggctcatgaatatgtaatcagtgtctattggtcacactcactgcactcgataccaatgcggtattttgtcaccaggctgatacgagcactggtacaaatctccatcttcgctgcgcccgtattggcctgcttcaatcttcttgcaccatgcaccaggggtaatggccccgggaaccgttgcagggccagacggctgcgactgagctggcccaccaagccctaatgcataccaagccagaccttcatcatgccagccagcacgaaccagtgcatctctctcattgctgttcaacgtgtagttatgagcgccggctttggcatttggattatattgacggtacagcgggaattcgttcgtcgtatcggcagagtaccagccgacaccctcataccgccaacccttcgagacgagcatgtccctctcgtagctgttcatcgtgtaatggtgatcaccggcattggaattatacagacggtaaaccggaaccgaggactttaccggagccacccatccgacaccttcatagtgccagccaaggcttttcagattatcccgttcatagctattcgccgtatagaaatgctcgccggaattcggattgtacatacggtacatctcttgggagccctcatccgcatatgccacatgtgtagggccggagactgctatcgatatcgatagcaccatcatcaatcccaagattacggcacaaattcgctttattgcgattcgcataaccactcctcacttctattaagttttcctctcaccacccatgatagatgtgtaacgcgtgccaacacacggatgtatatccgccgactattcacgatgcaatttcagtgagcctactgccagcaacaagccaacgacaatcatcggttgcactagtccaacggtatctgcctattaatcagcatcagcggcaccgcgtattcgcgacatcaaaaaaatatgcaccacggtcccactcggcaattgttgatagaaccactgagcgtccgggatgctcaatcgaacacatccgtgtgaggcgggctaacctagcttatagccttcactgacgatgtattgaccactcgaattcgtaggaaccgaatggaagagatacgtgttagtgggctcaaatgcaacccagtaattggcccccataccctcgcgtgcattgtagaaggaggaaccacgattcccgatacggaaagttcccctaggagttgcgttgttgacgcccgttgaagcaatcagcgtgtagataacgtttgaaccacttttgacatatacacgttgatcggcaatcgatacattgatactcaggttcggcgttacgctcaggttcgggtacacgccaccggatgggcgctgatattgcggagccggcgctccttcacctggaccgacaccataccaggccaatccttcatcatgccaacccgcgcgaaccagcatgtctttctcattgctgttcaatgtgtaattatgagcaccggctttggcattcggattgtactggcggtacagcggatagctccgattggtatcggaggaataccaaccgataccttcatatcgccaacctttcgagacaagcatgtccctctcataactgttcagcgtgtaatggtggtcaccggcattggagttatacaaacggtacaccggaacagacgattgaaccggtgcgcgcctggattggctacaatgtattggactggttcatgcgggacatgacaacgaaggagttgatcatcatggccgatccgaatcgtccccgtcattacgaggaggagttcaagaggcagatcgtgcagctgtaacgagaacggcaagccgtcgtcgcagatcagggcggagtacggcatcccgcgttccacgctgcggcgttgggtgcaggggatacgtaacagcggctccacgaaagcggccgacaaccgcactcccgaggagaacgagctgatcgaattgcggaaacgcgacaggcagctggagatggaggtcgacgtttcagaacaagcggcgccggtattcgcacgaaagcaggcgtgatacggtccgacgccggccgctgcccgatatcagcgcagtgcgggatcctgggcgttgccaagtcgacctgccactggatgctcgaacaccccgaggccgaacgcgccgacccttacgagaaggatgtggagcgcgtgtggagggacagcggcaaggtgtacggggccaggaagatcaggcacgccctggaacatgagggcgtggcgctctccaggcgccgcgtcaaccggatcatgaagaggaacggcatggccggctcctgttccaaggccgcctataggccacgcccggccaggccggacgacgacccggctcccgacatcctcgcccgcgagttcaatggccatgcgccgcgcacccatccggcctccgacccggcctacgcgagggtcggcagttcgtgggcgtacgtctgcctgcccggcgacctggccagccggcagatcgccggccattcggtcggcgtcgggcacgacgccgatctcgtgttggccgcgttcgccgcgctgcgcttcccgctggatgagatcgaggtgttccacacggaccgcggcggcgggttcaccggggaacgcatcgaacgcatgctcgacgtgttcggcatcacacgttccctttccagacccggcaacccatacgacaacgcggtggtcgaatccaccaaccggctcgtcaagaaggaactcatccacaggaacgtctacacgaacgtggagcaactacgctcggacgtcaaccggtacgtgtggtggtacaaccaccaacggatccactcgaccctcgggtacctgagccccgtggagttcacacaacaaggaaaaaccctctagaaacagtccaacacaccgttgccaatccagccaggctcacggcccgcgacgacgagatcttccgatcgcgcgaccgcgcgctgaaggcttcgggccgcagcacgaagcggctgccggcgatcgcggggacggtcgagttccgcgtgcgccgttaccgggggccggacggcggccccccgctacctgctgttcgaggacacgggcatctgcatgcccaaggagaaggccagccgcgggctgaaggcgttcgtcgcgtcgatggcgtgcgagcaggcctaccgtccggtggccgcgcacgtggccgtgttctcccgtgagccggtcagcccggcagcggtcaaggatgcggtcgagtcatgcgccgcgccgcgcaccgcacggctcgccagacgcgtcggccccgacatggcatacttgaacaagacgctcgcccgcatcgcgggcgtcgaaccggaagaaggcgaaaccccgcaagccgacgaggactaggatttcgcgctcaccaccggtgaggcaccactccgggcttcgcgctcattttcaaatgaggcacctcgcccctgccatctcaatgccaaacgcccccagccgttggcatgcgacggtatgctggaacggtgaacagcatggcgggcagcggcgtgttcgagccgcgtaatattctggtgactggcggatgcggcttcattggcgcgaacttcgtgcgatacgtggcgcggaaccatccgcatgtgcacatcaccgtgctcgacaagctgacgtacgccggcaatccggagaacatcgccggtctgccatcgtcgcaggtcgatcttgtcgtggggggacatcggcgacgtcgcgctgttggagcgtatcgtgcccagtcatgacgccatagtccacttcgccgcggaatcgcataacgacaattccatcgccgatccggaaccgttcatccgcacgaatgtggaaggcacaatgcggttgttggaggccgcccggaaacacgatgtgcgcttccaccacatcagcaccggcgaacgaggtatacggcgatctggcgctggatgattcggcgcgtttcacggaagacacgccgtaccgtccttcaagcccgtacagcgcctcgaaggcggcgtccgaccatctggtgcgcgcatgggtgcgtacatacggtctgcgcgccaccatctccaactgctccaacaactatggcccgtaccagcatgtggagaagttcattccacggcagatcacctccatcatggagggcgcgcggccgaaactgtacggcaccggccagaacgtgcgcgactctggatacatacggaagaccactctcgcgcggtgtgggcgattctcacccgtgggcgcatcggcgaaacgtatctgatcggagcggacggcgagatgagcaacatcgccgtgctgcgcatgatcctgcatctgatgggtcagccggaggatgcgttcgactgggtgcgggacaggcccgggcacgacaggcgatacgcgatcgacgcatccaaactgcgcgccgaactgggctggtcgccgatgcacaccgacttcgccggcggattatgtaacgtcatcgactggtatacggaacaccgcggctggtgggcgccggccaaggaagccaccgaggcccgctaccgcgcgcaagggcagtgaaacgacgtctgctacgggcggcccttccgcggcggggcgaccttccgtagcagacgctgcacgggcttaagcaccacggtatcggcaatcaccgcgaatagcagcgccgccagcaacgtagcgccaaacatcagcacgctgatacccgcatacgaccatccatctgtaggcacaggcatcctcgggccaatcagcaccttggacagcggtgagtgcaccaagtaaatcgtgtaggaatatccggccagccagataatcgccttacacacccgcgccgacgtgatgtgcacgtcgtaccggaagaacaggaacgtcgccattaccaccatcgcgaacgcaaccgtgaccgtgcggccaacctgcatctgctggccggcgaacagatatggcgtggcaacggtccaagccaaggcgaatggtgccaacgcatacacgccgtgccgtacacgcgcggacggcggatagtattccaacacgaatcccaacaggtagtagatcagcagtccacgccaagggaatgactgcaggaacgtcaacggatatccggcaagatcgcatatatgctcggcagcggccacggcggcggccagcccgaccagcaaccaggctcccgatcggcctatcgcgcgcatcatcgcggccaggaagggcgtggccagcacaaacccggcaagcatgaacacgaaccaatagacggaatcgtcatacccggagaacagatcaaacaacgttccagacacagcgccgccaaccgaacggtgatcgatcaccaggtaggcgacgaatcccatgccgcctgcatacaacaaatacggcacaatcagcgagacaaaacgcttgtagtaatagcgcacgtacggcgcgaggctgttgggatcggcttggccggcaccgccgcctgcccgggcatcagagccagagaccggcagacggcccgctgaatgggtgctcaccggccggtcggcatcgaatgtcaggttgaaccgacccgataccataatgaacagcggattgcagaccatgaacagcgcgaacagtacggatcgcgtcacttccgcgctgccggcgagggtcatcttgacgggcatgtagttgttgatcacgtggacgccgatgaccaggcacatcgccaccacgcgcagcagatcgtagttcacgtcgcgcggcctgccggcgacgcccggcggcgtcggaaacggaatcgggcatggtcatcacatggatcccgccagggacttcaaatcgaccgggcagctgatctggctcttcagcttgtccaaggcgtccaggccggccgagggattggaggacgcgtccttatgcgcatcgttcttgccgccgtccgcgccgccgttcgttgtcgtcgttcgcaccatcggcgccgttcgtatccgccgtgcactcatcggtcacattaccgttggagcccgtctcgacgccatccgcattcaccaccggcgtggttaccacgttcagtggatgtgtggcatcgctgctgacccgaacggtataagcaatcgtcaattcttttccgggctcgatccactgctggttgaacataatgtactgacggtcatacaggctcgcggtgttggtaccccatgaatctatatcagcctgcacagcggtgatctcgccaccgtacggagcggtaagcaccacgcggtacaacatgccgccgagcactggattctccgagccgccattaacgaaatcaggcaacgattcggccttagccttagtcagcgtgttcttcatggtgaaggtgaccgtgtattcgtcaccgagctgatcttccgtaaactgacccagatgcgtgttacgcacggctgtcgtgatgcgcttatccagcacgccagaatacagggcgttctggctggctgaggcgtcgccgcaggtttttgtgaccgtggtggaggtcttcagataccaatcctgcttgccttgctgcagctccgaaagatagatgccggcttcgggcacctgactgtcagcagacaactcgccactggccttatcgtcgataagtccggtggcaatcagcgcctcctgctcatccggatcagccatccatagcttgaaatgaccgctagcgctggtatctctaattgccttcaacagcggggatgcggtagaggcattcgcgttgccaagcacgtggttcataattgcttgagccgcttcggaaacgaagttgttctgctgctcgaagtccgggtaatccgtgtacaggtctgaagcgaagaacggcaccgtggtggtgctatccagcactcggccgtccgaaagcttgaccttgcctgtggctcccagcaatgcctggagaaatacgggatcgagtgacaatacacccgctacgttctcgtcttcgttgcctttctgatacagccacatgtacttgttcatctgtgccacacgctggaattcggggtcgatggtcgtggtggccgggtactggtcaaaagtgccaccaaatacctggcgctccttcagcaccgtttcatccattggctcctcaggaatgtcccaaccagaagtggtggcgaaatcaccgatggtaatcgtgcccttatctgccgtgattgcggcgatggtgcctaccatgccgcccgccgaacgcagctcggccgggttctgcaccatcaccaaatacgtgcgcttgccgtcctcgccaagcagttgcggtagcaagttaatgaggccatcgtattcgccgagcatcgaatccacggtcttgagcgcagccttttcggtttcgagcacggtggccaccttggcgacgctcggagtcggcaccttgttgagcttggtgagctgctgcgagatatccttatgcgcctgcttgacgatatccggcatatccatcagggcgctgacgtccaccgagccattcttcagggagaagccctgcaatcgtttggacaggttcagcagatcagtgaacggaccgttgaccagcgtatccacggaagccagcatttcgcgggcggcggtgatgtcgcttccgaatcgcgaatggtcgcggaagaagtcccactgtgggccgttcagctccgcattgagatcattggtggcattgaccagctcttgggagatgtccgacagactcttatcgctgccgcagccaagtgccgaattggccagactttcggcggatgtcagcacacgctgcgcatccgtggccattctcgagacggatgccgcgtagagcgtgcccacacaggtgacgctggccagcaacgtcagcagcagtacaaccaccactcgcgcccatatcggcgtacggctgatcagcgaacggccgttaccacccacgtgctggggagtcttcaggtttacgggacccgtctgctgattcacagcgctattcgtagatgcggagcgattgaattttccgttaccggcatgacgtcttctcctacgccccacagccttatggctcgaatgccctgaagtgaatcgcatacttacctgcccgaaaatctgctcagctcatactgttatccagcgacgcgaggccacgcttccggatgccggactccgggcaaatccggaatcgcagacatgccggagcacacgtgacgccacgcatatctcatgccagtgtaccgatgccaccgaaatagaccgaggatttatcccatactgggtgcaaatccccgcatgactaccacatcgctgtcagaatgttctcagacttcattgaggggtataacagtattgcgcaagaaaacggtcactaaccgcaacaatagttaaagccgtattgatttgttcggcttaggagaacgggagaggtaattacatgttcgtcctcagcaacgcctggcgggccctgacacgttctaaaggacgtacggccctgaccgcgttcatcaccttggcggtcaccttcggcacagtcgccggactggccatcattcaagaagataccaacgcacacaccaccgcgtacgatcagcagaaggccacgttggccattcgcccgactgcggctacatggaagaaggtctccgctacggactcggcttccaccaagcattacatgacgtggacctcatacaccgaatacgccacgctcgtccagtcggccaccaactcgttgaacttcacggttaccgaaaccgtgccggcccgcgtgagcggtgatttgaaggccctggacggcggatcgctgggctcggcctccgatgacgagaccggtggccagctcatttggcgagccttctggaccaaggattccgccaaggccagcgacctcggcaccttcgaaatcgtggacggcaaggacctgagctacaacaaccagtcctccaacccgaacaccaccggcgcactggtctctgaagcgtttgcctccgccaacaacctgaaggtgggcgatacgctcaaggtggcggccgcctcggacgccaagaccacggccaaactcaaggtgcgcggcatctacaagtacacatccgaatccgccgtcgccaatccggtgacggccgcccgcaaccgcgagaacgcgattttcaccaactatcagaccttcgccaaggccggactcgacccacagtccaccgacagcaccgcctccggctgggcagtgccagatctggacgtggtgttcgacgccggtgattccgctacatacaagtccttggtgtccaccctcaagaaatccaagctgcccgccaagggttacgagttctcttccccttcgctggaatcctacaacgcttctctggagccgctggatacgctatcctcgcgcgcgaagaccggcaccattgtgttggttgccgtgggcggcgtgctgttgctcatcctcgtgctgtcgggcgtgtgggcgcccaagcgtgacgacgagatcggcatggcactggtgtccggcgtcactcgcgggcgtttgggatggcagttcatgctggaagtgttcatcgtcaccctgcccttctacgtgattggtctggtcggaggcgcgttcgccgccaatccgatcggatctgccctggcatccggccatgccaccccggtgacatcgggtctgatttggaccatggtctggtatggactgggttcaatcctgatcctggcgattcttgccgccctgcgccttgcgttcttcagcgcgaacaagctgtttgccgccgatggcgactggggcaccgtgagcgagaccaacaagacgaccaccacaaccgacgatgcggaggcacaggcatgagcgacaggaacaacgatcaggaactcgagaagaccactgacgcaacggctgacgaagtgacttctgagactgagacgaacgacgccattgaatccgttccagctgactccatgcagttcagcgtgaccttcgatgacgttgatgacgaaggcactgttgacgatggtatttacagcgcactggcatctgccgaaaccggagaaatcgacgagaccagcgaggccgaagcagacgccatcgcttcggccaacgcatccgccgaagtgaccgagcgcaatgccgcccgcgtcaacgaaacactccgactggccaaaaccgatcacaaagacgcattggccgagcatgcggagcctcagggcaaagcgtccgaacccaccatgacgctggcctcgcgtatcgatcgcgtgttggtgggcggcggttctgacgacattctgctcaagacctacccgaccttcgccctgaacaaggtgacggtcgccggccccaagggcaaggtcaacatcctcgatggcgcgaatttcttctgctattccggacacgcatacgcactgctgatcagcgacgaccccgattcgggtatcaccgccgacgccaagcgtcgcgcgctgatgggcgtgatgagcggtttgaccacgccggcgtctggcacggtgatgaacaagagcgccaacattgttgagctcgagcccgtggaactgcgcggccaccgtctgggcatcgtaccgcagctgcacgccgtgcagccgaagctcgacgccgaacaaaacgtgctgtacgccatgaatgcgtccaaccgcaacttcctgaagcccaagccggtgatcgcccgcgaactgctggccaaggtcggcttctctgaggccaccagcggcgtggccgtcggcacattgcctttggtgcagcagcgtttggtggccatcgcccgtgcaatcagcaccgaggccgaggtgctgatcctcgacgagccgacacgagggctgaacgcggatgacgaggtgaccgtgttcgccgcgctggccaagctggcgcacaccggtgacccgaagcactgcgttatcgtgctcactgcgtcgcgcgaaatcgccgaagcagccgacacactcttcgaaatctgatgttcagaccatagagccccctgtgattcgtattgccgaatcacaggggtttttcaatgctgcggctcattgccgcgctaatctgaggataaatctgaccgtacgaggcgaaacctgataattatgaccggatatattcccacactggagcagatcgacgaattgcaccgcaaaatcgcgccgtccaaggcggcgtacgagctggtgcacacgcattgcgtgattgtagcgaccatcggctgccagatcgtgcgccggcagaacgcgctgtttacgcgccgctgcacattaccgaaggacgcggaggtaccgcccaccgcaggcgtcaccggcggccatgtgccgccgcgtctgctcgacgagcatttggtactcatcggcggactgctgcatgacatcggcacctaccgcgtgttcaagcatgacggctctgacggcgaaccgctcaaattcagcaagaaacgctacattctgcacggtcttaagggctacgagtatctgctcgacgagggcgtggacgagtccatcgcccagttctgccgcaaccataccggcgtgggacttacgcgcgaggatgtggtgcgccaggagctgccgttgccaccagccgactatgtgccgatgaatctcgagcaggaagtggtgatgtacgccgacaagttccatagcaagtcagtgccgccgaagttcctgcaggtcgaggcgtatacggcccgagccgagcgatttggcggagagaacaaacagcgatggctggatctggtagccaagtatggcgtgccggatattccggcgttggcggagaagtatgggatgcggatgatttgaggctctaggggtctccccccaagtcagcctgtcggctgacagccccctcgtcagagggggcttatgaaggtatttcagatggaacggagacggtaggtgccgttgcggttggagacgatgatcatctggtcgttctccagcacgttccagccttcctgcttgtagccggaagaggagaccaccacaccggcggagtcgccgttgtcgtcgcgcagctcacggtagcgcatcacacggtagtcggcggcctgctcgccacggccgtactcatcgtagatttccacgatgcgcgggctggtcttctcacgaccggcggcgcacagggcgatgagctggtcctcggactgaatcatgcagttgtagctggacttcgggtaggcttggcgcagttcgcgcacggcctgggccacggcctcgtcgagcgagaagccgaagccgatgtattccagaatcaccgcgaagaagatggcggagtcggaacggccgccggtggagaggaacacgctgtggttcaccgggtatgagcggttggtgacgatgttgcggccattggcgtccgagatatcgccgttgtggatgaagctcaggccgttcgcatagaacgggtgctggttctccatgatgagcggcagattggaacttgccaagcgcaggtgccagatggcaccgcgagacggttcgtcggccagcgcctcaaacgtgctgtcatgacgggccgcgatggtcgacttgtagattcgggtgccggtttccggggtgggtgcgccaccgtcgcgcacgtgcggtgcttcggcaggatcggaaagctgggctacaccccagccatcattgtggatttcagacagttcacggaaatcctcgacattgtcttgccccaacacagcgttgagactcaggttgaagcctgccgtcgcgtatcccagtaatctgcacatggtatttcaacttaccgaaaccgtgtggcgacgtgcggcgaccgttataggcattctttatagagcgcatcagcgccgctgcaaactggtatattatcgcttctgtttggcggagcgctgaggcttggcggcgggtttgccgttctcggccttgcccttatcgcccttatcgccctgctcagcgggcgcatcggcggcagcggcctcagcggtcttccgcgcctcggccgatacggcggcatcgagctcctgtaccaatcgcccaagcccggacgtggtgtccatcgggtcagggacggcggccgggtcggccactgcacgagtcggcgtgggcgtcgggatggtcttggccgtatcggtgcgcttcagacgcggtgggcggcgggtggagacgaacagcggctgcacctcgaccaacgggttgtaaggtgccagaccgaaccacttaaccggcgagccggccatgtggcggattgcgtacttggcttgcaacgacagggcaccgcgtgcggaaaccttggattccggcatcagggccttgtgaatcagcacgtaacggatggtgccgatgtccggatcggcgtcgaccttggggtaaatcgacttctgcttaggcagttcgccggttttggacaggtcgtgcatgatctggtggatgtacgccgggatggactgcgaaaccttgaatcccaaacggaagcgcacgcggtagatgtagttcgtgccgaagtcctccaccgagtattcacgggtgaacggctcgtcggtggtttccacgctgactgcccaccaagcacgggcgcgcttggggtggtcggcgaaaatggagaagaagatgtccgtgtcgagtcgcttggtctccgagtcggaggtcaggtacacgatgttgtccgcaaaatacgggatgcggaaatcactgtgcagcttgtcgagcgcgggtaggaagtcgttgggccgcatgtgacggcgttgcgcacgttcgagcttggtgccctcattccacgtgtacatgacgaacagaatcgcggcggtcagcagcatggtgaaccaaccaccatgcaggaatttggccatagacgcgatgaagaacatggcctgaatcgccaagaacagcacggtgaacacgatggcaccgacccgcttgccggaatgccataggtagacgccgagcaacacggtggtggtgatcatcgtaatggtcaacgccagtccatatgcggcagagatgtgttccgaatccttgaagatggcgagtacggccagtgtggagacgcacagcacgccgttgaccaccggaatgtacagctggccacgcgtgcgggccgggtaccgcacctgcagatgaggcatccaattgaggcgggtggcttcggagaccatggtgaacgcgccggtaatcagggcctgggaagcgatcacgccggccgaaacagacagaatcacggccagataacgtacgttcggagacatcatctggaagaacgggttgagtgactccatcgcagtgtattgcgggttatcgctattggccagcatccacgcaccttggccgaagtagttgagcaccagcgcaaccttgatgaatggccaagtgaagtagatgttgccgcgccccacgtggcccatgtcggagtacagcgcctcggcaccggtggtcgagaggaacacggtgcccataagggcgatgccggcagcattgttcgggctgaacaggaatttgatgccgtacaccgggttcagggcctcgaacacagaccagtcgttagagagattcgtgacgcccacgatggcgaggaagccgaaccagaccagcaccatcgagccgaatactttgccgatgctttcggtgccgcgcgactgcacggagaagagaatcacgatgatcacgacggtgatcatcagggtcaggcttgggttttcgtcgaacaacccttccaatggcggcagggtctgcaagccttcgactgcggaactgatggaaaccgccggggtaagtaccgaatccgcgaggaatgccgcgccgccgagcatggcgggaatcgcgagccatgcgccgtacttgcgaatcaacgagtacagtgcgaagatgccgccttcgccattgttgtcgatgcgcatagcaatgagcacatatttgacggtagtgatcagcgtaatcgaccagaagaccagcgacagcatgccgagcacggcctctcggtctacgctgccaagccctccctgaccggcaaggaaggtctgcgcggtgtacaagggcgaggtgccgatgtcgccgtacaccacgccgagcgccacgattgccatgccccaggtgaccttgtctgggctggattgcaggcgggcccaccatcgaccgaggccgcctttcgaccatgcgctggcgattttctcggcttctttggtttcagcttccctctgcttggcgagcgcctcgcgctcctccttggtgagagtgcggcgggacaccttgggagcgttggtaaaggtgtcggccctcagcagtgcttcttcttcctgtcgggccttggctttggcggcgccagactgggctttctgggcctttaaggctttttgggcgcgtgcggtcctttggttcgactcagccatacgttcagtcctccattgaggtggagatcatccccctcgcttatgtcaaacacatcatgatagacctcgttcacaattctgacaaattttacaagtcaacacatcgtctctacacgcgccgcgacggccgcacacccggccctcacagtccgtatacggcgcgggcggtatcgcgggtgccgcgcgccacatccgcgatgggcaagtcgagcgtatcggccatggcccgcaaggtgtagggaatcatgtacggcgcgttggtgcggccacgatacggcatgggcgtcagatacggcgcgtcggtttcgaccatcgcatggtccagccccacaatccgtagcgattcgcggataccgtcattgcctttgtagctcacggtgccggagaagctcagataccagccatgttcgcgcgcgatctcggccatctcacggtcgccggaatacgagtggaatacggtgcgttcgggcgcgccgtcggccagcagggtttcgatgacctcgcgatgggagtcgcggtcgtgaatctgcatgggcaggcccagttccttggccagggcaatatgcgcgcggaaagcctcgcgctgcagttccttggcaccttcgccggtgcggaagaggtccatgccggtctcgccgatagccaccacttgctcggggtatgtggtggcgaggcgatgtacttcggcgagcgcgtcctcgaaagacgtgtcatggtaaggcttgtatttgaggggcagaccatccggccccggcacaccgcgatgcccgtggagcacggactcattggggtgtattgcgagcgccgcgtgcacattacccggatgatcgagggccatctggacggcggtcatcaggtgcggcagctcgcaaccgcagtcgataatacccccaatgccgacagattgcgcctgcgccagcaattggtcgacgtcgtacaccgggacttcgggctgtcccttctcctgcgcctcatggctcatagcgcgcgcgaaagggattacggaggccacgtgagtgtggttgtcgatggtctgggcatcgtccggcaatgcttcaggtgccggggcccagctacggtcgcgatggtggtgcttgctcatggtttctcagtgtaggctgtttctcagtgtaggctaccgccagcaacgctcgtaaggcagtccggtaagacgttcgactacacgacgggtatcgtcggtcacgcccgcctgaacttgccgtctcttgccacgagcgcaacattcccgggaaagtaacgcaaccggcaagcgagacggccgccatcctgccgcctttttctgcctcatcagcccattttctgcctcattttgataaaatatgaggcagaaaaactctcagaacatggggaaaagcggaacactaccggcatatttcacagtgtttatcgttaccgataatgtcatcacgaaacatacctaaagcaacatctcgtcactcttccggcgctccactggccacgcgaatcatcgcgtactgggattcgtagaggcggtagtacgcgcccttggcggcgagcagctgcgcgtgcgagccgtgctcgacgatctggccgtgatcgatgtagaagatctcgtccgcgttctcgatcgtcgacaggcggtgcgcgatgatgaagctcgtgcgccccttgagcagatgctgcaggccggcctgcagcgcctcctcggtgcgcgtgtcgatgttgctcgtcgcctcgtccaggatcaggatacgcgggtcggcgagcagcacgcgcgcgaaggcgatgagctggcgctggccggccgacagggtcgatccgcgctcctccaccaccgtgtcgtacccgtcgggcagttccatgatgaactcgtgcgcgtgcacggccttcgccgccgcctcgatttcctcgtcggtggcgtcgagcttgccgtagcggatgttctcgcgcacgttgccggagaagatgaaggtgtcctgcagcatcacgcccatctgccggcgcagcgatgcgagcgtcacgtcgcgcacgtcgtagccgtcgatcgtcaccgagccctcggacacgtcgtagaagcgcgacagcaggttgatgatcgtcgtcttgccggcgcccgtcgggccgaccagcgcgatcgtgcgccccggttcgacgtggaaatccacgaggttgaggatgttgcggccgtccttctcgtagcggaacaccacgtcgttgaagtcgacgcgcccgcggatctgcggcaggtccgccgcgtcgggcttgttgcggatctccggcgtgacgtcgagcgtctcgaagatgcgctcgaggtacgccgagcaggtgatgagctggttgtagaagttgccgatgttgatcaccggattccagaagttgttcgcgtagccgacgaacgcgatgagcacgccggtggtcacgttcacgcccccgaagcccatcacgccgacgaagtagatgaacgagatggtcatcacggagatggtctgcacgcccggccacatgaggaactggatgtgcacggcgtgcatccacgcggaacgcacctcgccctgctgttcctggaaggtcctgaactgggcctgctcctgtgcgaaggtctgcgtggtcttcacgccggcgatcgactcgtggatgtaggcgttcaggttgctctgcttgttggagagcttctggaaggcgcgccgctggaagatctgcagcacgcgcacccagatgatgagcaccgggaacaggatcaggctccacagggccagctgccagtcgatcacgaacatcacgatcagcgtgatcacgaaggtgaacacgtcggagatcacgttgatcagaccggagctcagcgtgtccgaaagcgtgttcacatagttgaccacgcggatcaggatcttgccgtgcgggcgcgaatcgaagtagctgaagggcagcgtctggatatgcgtgaagatatcgcggcgcatgtccttgagcatgagctggccgacgcgcgtgatcgccaccgtgcggtagcgcagcccgaactcgtacagcacgatcagcgcggcgaggatcacggcgaggatgccgagcttgccgaggtccttgttcgggatcgcctcgtcgatcatgatcttggtcaggtacggcacggcgacgacgatgcagctcatcgagatgacgacgacgagaatgcgcgccacctgtgccatatacggtttgagatatttgccgacgcgcaggatgtcccggaagttgatctgctcctcgagttcctcatcctcgcggtatgtattgcgttgtgccataagtcctcttctaaaaaccttgtgcgacgccggactggagtccgagctgcttgtggtagatgtcccagtagcggccgtgtgcggccacgagttcggcgtgggtgccgcgttcgacgatacgtccgtgctcgagcaccagaatcaggtcggaatccttgaccgacgagatgcggtgggcgatggcgacgatggtcttgccgccgtccatctccttgaggtgcttctggatctccgcctcggtctccatatcgacggccgaggtcgtatcgtccataatcaggatcgacggattgtccgcgagcgcgcgggccagcgacaggcgctgcttctgcccgccggacaggcccacgccgcgttcgcccacgacggtgtcataaccctgtggcatcgacctgatgaaattgtccgcgccggcgatctgggccattttctggatatatcggtcgtcgctatcaccgctggcaccaaaaccgatgttgccgccgatggtgtcggagaacaggaaggtatcctgcgccacgatgcacacctgcgagcgcaaggtggccagcggccagtcgcgtgcgtcgatgccgtcgatgagcacatggccaacggtcgggtcgtagaagcgggagatgaggctgacgagcgtggacttgcccgcgccggtttcgccgaggatgccgagcttggagccggcgggcacggtgaagtcgaggtccttgaggatcggggtctccgggtcgtccgggaaggcgaagctgacgtggtcgaagcggatgtcgcccttgatgtgcagcgggcaggacttgcgttcggtggactgctgggcaccggatgttccggaagccacgggcgctccggtagccccggtagcctcatcatcgtgcttgacttgctcgacgatcgtgaccgcctgcttgacggcttcgaccgcgtcgggcttctccacgatgcgcggctgttcggtgagcagcttgcggattttgatgcagctggcgttgaatcgctgccagtcgttgatcagccagccggactggcgcaccgggccgtcgatcatccacaggaaggagttgaaactcaccagattgccgagggtcatgtagcccttgatgaccagaaagccgccgaggccgagggtgatgagctgcagcgagaagccgaggccgtccagccacggcatgtacttgcgcgagttgtaggccaaggccatgttgcactgcatgtaatcgtcgttgtgctcgtcgaacttttcggtctcgtacggttcgcgcacgaatgccttgaccacacggttgccctcgatgttctcttcgaccatggagttgagggaggccagcgagttgcggatggcgaagaacagcgggtgggcgtgcgtggacaggccgcgcgtgagcacaaaaatgaacggcgtgacgcaggccaggacgagcgcgagtcgccaatcgatggcgaacatcacgcacagggcgcccacgaacatgaccacgcagtcggcaatctgatagctcacccaactcaggcagtggcggatcgcgtcggtgtcggaggtcaggcggctcatgatgtcgccggtgcgtgtgtggttgaaatacgtgaagtcgagctcgtgcagcttctcgtattcgtcggagacgaggcggtagaccgagttctggccgaaacgctccatccacatctggtagccgtatcgcgcgcccacgcggatgatggtcatgaggatcatcagtccacacagacgtggcagttcgtcggcatgtccgccgacgatgacgcggtccacgatgataccggacagaatcggaatggtcagggccatcgtgttatttgcgatgaacagtagaagcgcgcctaccacgcggggcaggtctggtttgcagtatggcagcacccatttgagattgcttgcgctggtattgattcccggatcgacgtacatgtgaggagatcaccgtttcttggggattgtttgcttgtggtatggtgcggcatgctcctgcgccgcacgcggcaatcgctgccgccgcgattcacgatcagccgtgcttcgcactgcgcctgtcattggccgcatgaccgaagctctccttcatcggtcgaagcacgttcgactttcgcaaacgcgtactagtctagacagcctgcgtctaatcgcaacggcccgcaactctgcgtgttccccgcattagcaacgatacgcggctctctaagcgcaacattccccggaatgcgtcgctgcacacctccgaacaggtccaattcgcaacgcattcccgggaaagtggcgcatgtcatatcacgctcaaacaacccagcatagtgagtggttcattcacgttttacgtattgtgcgacggaatcggcatctcccgcaacacgtgagatatgcaaaagtgccgcacgctgaattgtgatcagcgtgcggcgctgcgcgaaacgcgtgaaatccgcagaacgcacgaaactcacgaaacagataaaacgtacaaaacgcaagcaaggcgaagacaacgaacagacagagacagacagcctacaggtcagaacgccagcgaacgcacgtaggaaccaacttgcgggcggaacagctaccggggattgttcgttcgcgatgttcgcattcatggcaggtttctccatacgattcgggcggtcggttcaggaggttggttggcggaggcaggttcggtttcagcgtcggtccaggaccacccagagcacgccgtgcggcggaatcgtgccggtgatgacgcggtcggcacccacgccttcaagacgcacgtcggcgggctcgcccggcgcgtcggcatacagatcggcgagtgtccaatcgtcattgcgggcgtcaagccccacgatggattggagctggatgttgcggccgatctcgtatgtgtcgctgccggtccagaacagcgcggcgtaatggccgccgtgatgcgcggaacgtgtgccatcagcccaatcggctgcgtcggcggaccagacgatgaactcgccacggtaggtgctctcatcccaccatttgccaaaaatccgttcgcgcacggtctcgcggttattggtggagccggcaagcacctcacgcaacgcgggattctgcagcagcgcgatggcgtcgctgttgctggtgggcagatcgccgccgaccataagcgggctacgccccatgcaccatagggccagcagtgtcttctgctcgtccagcgtaaggcgggattggcggtcgtcgccgcgttcggcgcgcaggcctatgtgcccgaacggcaccatgtcggcgtcggcccagtggccggtggtctggaacggcgcccagcgggccaagcgggcgaactgctggtagatgtcttcccaacggtcccacagatcgtcggaaatacgccacatttgggcgttctcgcgcaggaagtcgacgtagctcgtcgccacccagccgccgggcgagagagacaggtcaatcgaacggccgtatttggcttcggctttggcgatggcgcgatgataggcggcgatttcgtcggagtggaacggggtctgcatgtcgtcgaccttgaggaagtcgaggccccaggaggcgaacagatcgagctgcgcgtcataccaggcctgcgcgcccgggtgggattggttcaggccatagttgtccggattccacttgcacacgtggtcgaggtcggccacgtccttggcggtgtagttggtgccgtatacgggcaggttcttgtccacggcgatacgcgggatgccgcgcatcatgtgcacgccaagcttcaagcccagttcgtggacggcggcggcgagcgggccgaatcccttgccgccggcagcactcgggaaacgcaccgggtcaggcagctgacggccgtattcgtcgagaatcagcggcgcgttgtcgttgtaaccatgtgcgcgggcggtcgggtcgtaccagtcgatgtcgatgaccagcgtatcccagccggcgcttttcaggtgttcagccatgaaccgcgcgttggccagcagctcgtcttcggtgagggtcgtgccataggaatcccagctgttccagcccatcggcggacgccatgcctgaggaaggctctgcggaagatccgtcatcgtatcctgctttcgttgatattcgcataagttgccatacggcggtacgccagccgcaaaccaatcggcatcgcgcacgtacggatagatgaagagtgacgccactcccctggagagtcccatcccaacgtacgacgaacttcatggcctcttggcacaccgccgtatgtaccgttacatattcttccaccggaacgatatcaagcaagcgcatgttacgctcggcgcgtcatcgcctaagcgcagcattttcagcgattccggcacacagccaccatttgccaaaacacgatgttgtgaataccgttacaaccattggaagcattgcgggcatgatccaatgcccatcacaggcgaaacatgaggtgacgttatgccgagcggcaaaccaacattgcgcgacgtagcgaaggccgccggggtctcccccatgaccgcctcgaatgcgctgcacggcaagccgggtgttaaggattccactcgcgccaaagtgctggcggtggccgaaaagctcgattaccgcatcaatctgacggccagcatgctgaagtccggccgcagcaacatcatccacatcatcgtcaacgaattcgattcgccgttctactccaaactcgtcgaatcgctcgtcaccgaaaccaccgagcgcgggctgacgccgttcgtggagcaaacccggtactcgccggacgccgccaaacacgcgctggccaacaatccgttctccggtcagttgttcgacggcgagattatccacgcttcgggcctgaatgccggtgtgccgctttccgcgatcaaccacggccgaccgctggttctgattgacgcctgcgaggaaacgcccacgttcgataccgtgaacttcccgaacgaagacggcgcgcgggcggcagtgcagcatctcatcgaatgcggatgccaccgcatcgccatcgtcggcgacgggtattcgccacgaaccgaactggcgcatgtggaaagttccagcggactgcgcctgcgcggggccagcggcgcactgcttgacgccgggttgccgtatgacgaatcgacgaacttcattggttacggtagcgacagcggcatcgaagccggtcatgccatcgccgaggcgatgctcgaggttcgcgcacaatcggctgatggcattactgagtcccgttccccgggcaccacgcgggcaacgggaggcaccccggccatcgatggcatcttctgcattaacgactatgccgcattcggagtaatccgaggccttgccgactacggcatccgcgtgcccgacgatgtgaaagtcatcggcttcgacggcgccacggccggttcgtacaccacaccgacgctgagcaccgttcaagtggatctcgatcagctcgcccaattcgcgctcgatatgatcacccgccgcgtggaacagcgcgaccagggcgacggcaggtccgacgaatccgctggcatgccggccacgcgcgccaccattggatacacactggttccgcgcgagtccaccgtcggttcggcaaacaggtaacgccgaaacgctggaatagggcggcgattcccgactgccgcgcccactgcccaagtgccgtgcggcgtgacgtgcgaggtttcggcatgcgtcaaaccgttcccagcgctcccatgtggtggtggtgcccatgcgcacttttcctagggttaggaccatgaccttccctaatcacacggtgttgtagaggcgggcggggaaggcgtcgcggtattggccgggggtcaggccagcgcggcgcttgaagacgcgcatgaagtacttgggatcggcgtagcccacttctcgcgcaatatccgccacgctggaagcggtagaactcagcagttcgcgcgcacggtcgatgcgatattcgatgatctgctcggccacacccacgccgaacacgcgccggtacatcgcggtcagatagctgggtgaatagtggaagcgcgcggccactttggccacggtgatgtcgtcgaaggcattggccataatccacgagcggatggccagcatcggcgccaggccggacgaatcgccagcggcaccggccgaatcgacatgcatggcccattcctgttgctgccggacgcggtcggcactggtgatgggcttgccgtcgccccggtagccggcaagcgtgcgatgggtggcgaagtcagccttcagccgctcctgcgcgctgacttccagcagcaggccggtggcgaagtaatcgcagtaagcgttggaatacgggccgaatcgcgcatagatgtcgatgagttgcccacacatcaccgccagtcggtcgggatcgggcagggtgcgttcatcgggtaacaacaggcaatgatcgtcttgcggcagatttgcgtcatcggggagcatgcgcgcatccggcaatttgaaatgcatccagtagaagtccacgtcagacgtgatgatgtcggcgcccgcatgctccacattcggcggcaagagtgcgatttggccggcctcgatatgcagggtctgctcccccacccgcatcggcaggacgccccgacgcacgaacatcagctcgaaggtgtcgatggtgcgccgcagatggcgccagcccggtccggacacaaactgcccgaccgagtaaaagtccaccggcccttcgagccgacatgtcgtgatgcccatggctaccagagtagccgagagcaaatatcagccgcgcagccagacggtcatttcgttttcgccgcggttggcccaggcgaagtacgggatgagcgtggcggtggcgggctcgcgcttgaccggcgcgtacacggcgtagagcggtgcgaacgccggaacctcggccgcgccctcacccgcggcggccacagcagccggcaacggctcgcgccaagccggcacctcaagcttcaccatgcggcgggtcacatcttccacctcgccctggcccttgtcgtcgatgcccttggcgccggcgtggaagtcgaactcctcgaccttggccacgctcggatcggccaatagtgcctccgtatccgcgtgcagcaggtgcaggttcgcaccattatccttttcttcagcgcagaaagtaatcgggccgcgcacgaacgccaccttgccggcgtcctcgcgcaccagcgggttggcggccagcatacgtaccggcatcgggaagtcgaacgtcacggtgtcgccgtcgcgccattcgccggtcaggtacaggtagccgtcgcggatttcgcgggtcacgcgggaactatcggccccagactcagactcgcccgtggccgtaatcgcggcggcagcagcggactcatcgcccacccaaccgggcagacggaaggccagcgtaaagcgagcaggagcctgagccgaggtgccagcagcgtcaccgcccaagcgcacgacagccttgccatcgccctgccacggcaggttcgccgtaacatccagctccacagccgtaccattcaactcagctttggccacgccgcccatatacaagtgcgtgaacagcgtaccgccatcctcggcaaccgtgtaggcatattcctgcaccgactcaacgatgcgggcgatgttcggcgggcagcatgcgcagccgaaccacttctgacgcaccggcttgacgtggcgcaggcggctgtctttatggcaggcatacggattgacttccagcgggttcacgtagaagaagctcttgccgtccagcgccatgccggccagcgtggtgttgtacagcgcggattccatgacgtccgcgtactcggcctttggcgcgagctcgagcatgcgacgggcgaagaacgccagcgaaatcgcggcgcaggtctcggagtaggcggagtcgttgggcaggtcgtagttgtaggagaatgcctcgccgtccaccgtgccgccgatgccgccggtaacgtacagtttcttatcgacgatattgcgccagagccgctcggccgcatcggcgaggtcctggtcgtcggccagtcgggccacgtccgccagaccggagtagaagtagccggcgcgcacggcatggcctacggcttcgtcttgatcggtggccggcttgttcgcctggtgataggcgtaccggttggggtccgtgttgggtttgtagttggcgtcggcgtcgcgctttgcgttctcgtctgcctgaatatcgaagatgtacggctgccggcctcgctcggtcacgaaatattcggccagatcaaggtactgttgctcaccggtgacctcgtacagcctcaccaaagccatctcggcaatctcgtgaccggggtaaccacgcagctggctcggcttgcgaccgaagcgctcgtctacgtaatcggcgaaacggcaggcagccttgagtagcttgtctttgccggtgccctggtagtaggccaccgcaccttcaacgaggtggccgaggcagtacagttcgtgatggtcacgcagattggtgaacgcgcgatccatgccgttcaggatgtagtaggtgtccagatagccgttgtcgagttgggcggcgcacacgatgtcgatggcttggtcggcggtctgttccagtgcggggtccgggtgatgggcgagggaatagccgactgcctccacccacttggagaagtcggtgtcttggaacacgaagccgtagaacttgtccgggtcgggattggccgggtcttcggggagcgcctcaaatccgcagaacgtgtacttcggcggcacgaacgccttgcccagggtatccttgcgcttgttttgcgcggcagcggccttgaagttgtgcatgcaatagctgggggccgcgccggggacgttatcgttcagggcgttccactgatagggaatcacagccgtgcgcacgagttcctgctcggtgcgccagaacgaatcggtgacggtgacgtttttcagggccagcggcttgctatgcagcgaagtcatgacgtactcctttggactatgcgacattcgtcaacaatatgtatcggtacatatgatacgtgcgcccgcgcgagcagcaaggtggacaaatcgttggcggggtggaatcgccggcgcatatccgcccgtacgatttcgcccggtgaatcgcccgacgaatacacggcgacttatactaccgacggaccacaaacgtcgcctacatgaatggaagatcaatcatcatgacagcaaacgccagcgcacgggccatcaaacccgaacttctgcgtacgtacaccgaagacttcaacaaagaccgcgccaacctgatcgcggcggacgcggcggtttcggccggcgtgctcaaggcggccaccgactatcgcggcgtacgtgcgctgccgcgcgacttctccatcgagctcaagcagggttcgatcaccaatcaggagcgttccggccgttgctggatgttcgcctccctgaacacgctgcgttacgaactcatgcatcgctggaatcttgaggatttcgagttctccgagacctacctgttcttctgggacgcgatggagaagtcgaacacttatctggaaaacgtgctgcgcacgctcgacgaggcgaccgattcgcgtctgttcgaggccatcaatgagtcacctgcagacgatggtggctggtggcagatgttcgccgcactggtgaacaagtacggcctagtgcccaagagcgcctacccggagtctgagaactcccgtaattccgacgatttcaagcagtacctcaactccaagctgcgcgagttcgcggccgagctgcgccgccgttcggctgccggggcgtctgaggacgagctgcgtgcgttgaaggacgagtacatgggcaccgtgtaccgcatctgcgccgtggcgctcggcgaaccgccggagaagttcgacttcttcgcgcgccccaaggatgatgatgaggataagaagggcgaggcttgcaagtgcaaggccgaggccgacgcagacggcaaggccgaatcctgcaagtgcggcgaatcctgcaagtgcgagggcaaatccgacgccaaggcctgcaagtgcgataaggacaagtccgacaagccgaaaaccggcaaggacgagcgcccgcagattcgcgagatcggcatcaccccgcttgagttctacaagaagtacgtgccggtggacgtcaacgatttcgtgacgctggccaacgccccgctcaagaaccgcccgttcaaccagcgctaccgcatccgcttcagcgcgaacgtggccgaggctggcgatatggaattcgtcaacgtgccgctggacgtgttcaagaaggccgcgcttgaccagctcaccgccggccacccgatctggttcgcctgcgactgcacgcagttcgccctgcgcaaggacggtttcttcgaccagtccgtggtgcgcgtcgaccagctgttcggcaccgaattcaccggcgacaaggcccacggcctcgaatacggcgacagcccgagcaaccacgctatgaccttcaccggcgtgaacctcgacgaggacggcaagccgaaccgctggaaggtggagaacagctggggcaaggacgccggcaaggacggctactacgtcatgtccgacgtctggttcgaccgctacgttaccgagctcatcatccgcaaggagtacctcgacgacgccacccgcgccctgctcaccaccgaaccagtcgagctcgatccctggcagcctctcacccgccgctgccgctgacatattccgtctattggccgcggctgaagtgctcctatgttttgccgactcctcacagagtgagcaaaacataggagcactttagttatccacagagttatccacatcctcagcaagctagaaccacataccccgtttttcatggcgaacaagcgaccgctacgctacggtggcgttatgaacagcggatttcccaccccgccacccggcgtattcgacgatgaaccacccggctggaccaacaatgccgcggcaccgagtgctgcgtccacgcacgccgtcaagcccgagccatactcaccaccgcgtatggcaacccccactgcgcccgctatgagcgaaaccctcacccaacgtaagcgggaaatgcttaaacgatgcacggacgccgcgcaacagctcggaaagccggtgctcttcggcatgaccacatcgctgatactgcaatccgtgccgcttcccaaggattgcgatctcaatgccaccgagctccataccgtctccgactcgcatcgcacccggatacgcgccgtcgttccgccaacaacaccgcacatctggaaaccgctaagcaccgcgcacaatgcacgtatcaacaagcatgtgcacgcgctggatctggtacatacttgggcgcagctcgccgctcacatgtcattggaatcattggtcatacttggcgacgcaacccttacggcaatagcgcgcaagccgagcctatcgggcggccgcaccgccgacgaaatttatcaggactttgtgcggcaggtcagcgaacttccgaaattcaacgcgaaagccacatgcatgatcgcacttgaatttattgcaccgcgcgtggattctccgatggaatcagagacccgtatcacaaccacgcaatacgggcttccacgagccgtgacaaattacacagtgcccggcgcgacgttcagcaatggtgcgccgataacactcgatctcgcttggcccgaattccgcgtcgccatcgaatatgacggcgatcatcatcgcacagacaaggcccagtggcggcgagacaacgacaagcgcgaattgttacggcatcatcattggatcgtcctcatcgccaccgccgcgaatatggctgatgaaccgtctcaagccgaactcgcctaccgagccgggcgacagctggcgttgcgaggcgccatattcgatttcaccttgacagcgacgccgctcaatgaacttgcccggcggaaacgacggaaatccaccggggcgcactgagctgacatcgatacgattgcgcgcgcttgctgcgacgcatatgccattcatcgcaccccatttggtcgcgtggccccgaccgcatggcactgttgtgtgtcacacgccatgttacgtccggcgaatccgcacatcatctgcgttgcgtactgccatattatgcggttcgcgatatacgtcacggtgtccgatgtcctggtaacgacgtcaatcgatttatgtgtgtaccgggccagattttgttgtcccggttctccatttcgcctctttttgagcaaccgggacagaaacaccctcgaaaaatcgccaattcggccctaccgcacaatatccgccatcacacatcggcggaattccgggcttctggatttgcatacattgagcgctcacgggatggtctgtcccggttcccaaaaagaggccaaaatcacgaaccgggacaacgaaatctggcccggttcgcacgtcaatcggttgccgtcaccaccgggacaccgactgcgcatagataagatgcttcaatgcttaacaggcatgcgaccataccgcgatagcaacgtttcgctggaagtagaggaatcaagcagcacccccccaaaccggaagcatggagggaatcctgcaatgctccgaatcaccgcgccccgtgcttggtgtggcggatcacggcttcgagcggcgtggatatagctggacagcagcgtaacttgcgttgcatgatgcggcccaaaacgaagaaacccggcggagggggccgccgggtgagagagaagagagaagaagggttcagttatggggttcggaagaacctcgccaccggtatgaacttcattccgttgacatcttctatataaccgtctctttcttggggattcgatgtgcttgtctgagaaaagtcttggcaaactgtgacgggtttgtaacgccgcccgacaaccggcctcgcattgtcggggctaggccgcacatacggcaacgggccaccccgcaacacttcatgtgcgaggtggcccgtcagctacgagctagcaatgccgaatcactcggcggcgagcttggccttctcggcggccagacgttcggcttcggcggcacggcgagcagccaacgcttcatcgaagcgagccagctcctcttccacggcctcggtcggaatcttggcgaagatcggtgcgggcttaggcaccatggcgccgacctcgattgcctcgctcttccacgggtgcacgttcacaccgagctcgtaatcgccggtgatgatcgggtacgtgaagccgggcttgtcgagatcctcgacttccttgagctcaggcagcggcgagaaggtgccggtgccgccgagcgcctcccacaccttctgtgcggagtgcggcaggaacggcgcgagcaggtggttcgcgtcagacacggcctgagcggccacgtgcagcacggtgccgagacgagcctggtcgtccttaatcttccacggttcggtggcggaaatgtacttgttgatgtcgccgaccacacgcatcgcctcggacagggcgtgcttctggtggtgggtttcgatggaggagccgaccacgtcgaacgcggcggaagcctcttccagaaggccacggtcttcgttggtcatcgaatcctcgtccagcggcggaatctcgccgaagttcttgttgatgaggttggccacgcggttcaccaggttgccccacgaggaggcgagctcctcgttgttgtggcgcacgaactcggcccacgtgaagtcggaatccgaggattcggggccggccacggaaatgtagtagcgcacggcatccacggggtagcgggcgaggatgtccttgacgtagatcacgatgccgcgggaggagctgaacttcttgccttccatggtcatgaactcgctggccaccacctgctcaggcaggttgagcggacccatcgggccggtttcgccgcccttggagcccttgccgttgtacgccagcatttcggacggccagatctgggagtggaaggtgatgttgtcctttcccatgaagtagtaggccgggcagctcgggtcgttccaccattcgcgccacttctccgggtcgccctgacggcgggcccattcgatggaagccgacaggtagccgatcacggcgtcgaaccacacgtacagcttcttgttcgggttgtcaatccagtccttcaccggcaccgggataccccagtcgatgtcacgggtgatggcgcgcggcttaacttccttgaacaggccgagcgagaagttgatgacgttggtacgccagcccttgcgggtctccagccacgccttgttggcttcggcgagcgccggcaggtcgaggaagtagtgctcggtctgctcgaagcgcggggtttcgccgttaatcttggagacggggttgatgagctcgtccgggtcgagctcgttgccgcaggcgtcgcactggtcgccacgcgcaccttcggcgtggcaaatcgggcactcgccctcgatgtagcggtcgggcagggtacggccggtggacgggctaatcgccacctgctgggtgcccttgtagatgtagccgttctccaagcactgcttgaacatctcctgcaccacgtgctcgtggttaccggtggtggtgcgagtgaacaggtcgtagctcaggccgaggtcgcacagatccttggcgatcacgcggttgtaacggttggccagttcctgggcagtgaggccttccttctccgcctcgacgagaatcggggtgccgtgctcgtcggtgccggacaccatgagcacatcattgcccttcatgcgctcgtagcgcgcgtagacgtcggagggcacaccaaatcccgcgacgtggccgatatgacgggggccgtttgcatacggccaagcaacattcaccaaaacatgactcataaggcttgattatccggcgcggcggggacacgcccggatagctgccgcgccgccatcctcatcccactcacctatccacccgcaacttccccacatacttatccgcacacctcttgcgcgcttatccacatacgcattcgcacacgtatccgcgcacccatccgcacgcacgcccacgcacatccgcacacacttccgccggccaatatccaccgagttatccacatcatttgcgcgcctagtaaagttatgcacttatccaccgttttcgcctatccggtggcgcgcaagccgcatttctgcatattgttcggtcatggatatcacagcaggtccgatgacggacatcacaacagtcgcctcgccggcaaccgcgcagcctgcggtgccgccgatactgtttaccaaggatctgccgggaccgctcagccttaaccgtctggccgccttcggcacgttacataagctcgacgattccgccggctactggatcgagcattcgggcacactgtatggtcgcgcgaaaatcgtcgcggaggtcgccccgtttggcactgtggtgtgttcgatgaccgccgcttgggtatggctgggaggccccgactttccgagtaccatagacgtgatttccacatcgcacttccgctcggcatccgtcagccgccgtatccgcgtattcaaaagattgacgttgccggagcaaatcatcaagctcggcgggctgcctgtcaccacgccagcccgtacggcttgcgacctggtgatgagtcctgaagacatccccgatccttccaccgtcaacgcactggtgtgccagctgatgtccgcgtaccagtttcggccaaacgactgtctgcaaatcgtcaaggagcatcggcatcacaagtacgccggacgcgcacgcatgttttttgaatcggtgcagcaggagatggacgaaccggctttggagcaatgcgcatgacgagggggttcattgtcagaggccatcgcagaggccgccatgccgctcaccgtttacggcatttgcggcaggcgcaacggttgcctcgccacgcggcggcggcacactcatccgaatccgcatcgcgcgcaatctcggatatgaccgcgccgcctgaaccgcccatcagacttacgcccgcggtggcatgttcgcccgatacggatgttgccgtgctctggcacatcgcatatcacgtgcccgaactgcgtaaatggctggttgccaatcccaaagccgacgcgcctttgctggaattggtctcgcagcgtggtgggcccggggtccggcaggcgttggaaatattgttcgagtcgatggaagcgtaacggggagataatcgccggctgctgcgctatcccttgattttcagcacagccgcatacacctgcttgcgattggccaacgatccgtcagccagtggatgctcctgcaccacttgcgcgatggcgtccttgatacgcaggccgtcctccaaagcacggtcgatggagagcacggccatgtcatccacgctcaacgtgctgggcgcggccgcttcggcctcctcgttggacgcgccgccgatgaccagcaccatctcgccacggggcggatcatcaatcacactttggcgaatctcgtcaatcgggccgcgacgaatctgctcataatccttggtgagttcgcggcacagggccatcgggcgattcgggccgaacgcgtccagcagatcgtccatcgaatcggcaatgcgatgaggcgtctcgtagaacacgatggtgcggcgttcgggcaacagcgtgcgcagatactgcacgcgctcggaatgctttcgcggtaggaagccttcgtagcagaagcggtcggtgggcaggccggagagggcgagcgcgtcgagcacagcggaggggccgggcgcgcaggtgacgggcagaccgcgttcgatggcacggcgcacgatggccaagccggggtcgttgatggtgggcatgccggcgtcggatacgacgagcacggtggcgccggtttcgacctggtcgagcaggccgtcggccttgtcgcgctcgttgtggtcgtgataggcgatgacgcgaccgttcacatagacgccgaggcgacgggcgagatcgtagaggcggcgcgtgtcttcggcggccacgatatcggcccgttccaagagggccaccagacgggctgaagcgtcgccgacattgccgatcggggtggcggcgagcaccacggtgccggcggggatggtcacggccgattcgcgggattgggcgacggcggattcgccggcatgaacttcatcattgcgttcaggcacttgcgtcacgctaccgtcagcgtcatactgctcattcaactcatctgcgcttgtcatactcccagtattgcccatgccacagagcaatccacgacaatccatggcgaaatcgaggcattctccctttgcaggggctgatttcacatgttccggaggtctacttccgtttcaaggggctcctcatccggtgaagcaccgatacaaacggctttgacgcaacgctattccgccattttggcggcgtatctacttgaccatcagccccttgaaacgcgagtagacctccggcaaaccccaaatcagccccttgaaacgcgagatggcagaatttcaacgaaaacaaatgaaaagaccctctgcggtggaatgaatgcagagggtctcgtggagctgacggtagtcgaaaccgcgacctcttcgatgcgaacgaagcgctctaccaactgagctacagccccttggatgttactttgctccgcaaagcaactcgcaacaatatagtacggagtgcggtcaaacgcaatttgacgccgaagtgtcgcacgcgtgtcgacacggtaacgtttcggtgtcgccggttgggccgccgcaagcgcagcatcgtcccagccgtctgccggcgcaatagctcgaactaagatcaccactccgcctggataccagggataccgcggcggcttgttcagtgtcgcagacggggcaagtcacccacaccgctccgtatggataccgcggcggcacccggcaacgccatcacgtctccagcacgcccaacaccttcttctcgttgtagaacgcgaacacgatgccgcccaagccgcacagcacggccgcgcacacggcggcgatgcggtagcccgcgccggacgccatgccgatggtggagacgccggtgaacagcagcatggccacggactggcccatcttcatcgcaaaggtgcgggccgcgtagaacatgccctgacggtcctggccggtggtcttggaactggcgtcggcgatattcgccacgatggcctgcggcaggatgccgaacgcggccatcggaatcgcgccgaccaccgagagcaccaaaccctgggccatcgccggaatgaagccgagcacggccgaaccaagggcgccggcaaatgcgaacgcacaggtgaagatcacgaaggcaaccagcagcagcctcttcttgccgaccttattggccaagatattgaccggcagatagaacagcacggagacgccggtcatgagcacgaagtagatggtcgtggtggtttccggcagcttgagcaggctggtcacgaagaacggcagaccggtctggaaggtggtgatggccacccagtagaccacgtcggaacacacgaacttgcggaattcgccgtcgccgaacgtctgcttcagggattcgatggccgattcggaggtgggctgggagttgacgtagtccttctcgcggatggccagcggcggcaccagcatgcacacgaacgccacggcggccatgatggtgaaggtcacgcggatggcggtgatacggcccatcatcggcacgaacgcgccccaaatcaccggcgccacgtacgcgatggccgtgccggccacccaagtgaaggagatggcggtggagatggtgagttgctgcttggagtcgtggccgagttcggcgatgagcgcgttgtacggcgtgcagtagaacgtgagggcgatgtagtagccgatcacggtgacgaacaggaacgccgcgttcacccagctggtgccgttgatcgggctccagaacacgagcacggtgaccaccgcgagcggcagggcggcgaatttcaggaacggcatacggcggccggatttggcgtcgcaacggtcggagagagacgccacggccgggtccacgaacgcgtcgaagaatcgggcgaaggcggtgatgccgcccaccacggtcacgatgccgagaacgaccaggccctgcggcacgaatacggtctggccttgggagatggtctcctggtcaggttggtagaaatacacgagccagttggagatgatgccggaaagcagcgcccacccgaactggccgaccgcaaacgcccacactttggcgatggggagatctttgatggctgatttcgccggtgcaacttgcgcgcccgttacacttgctgtagtcgtattgcccattccccataacctccgaatcaacattgacacagtgtcaaaatccagtatacaccggcacaccatgcgttctacgatagtgggcatgacaagtctgaccgagcaactgccatacgtatacgcttttcctgatgcgttggggaccggattactggtgcacaccgagagcgtattagacgatgagatacgcgatcgtattggctcgttcatccatgaatatgaggttgtattatctcgattccgcgatgattccatcgtcggccggatgcgcacggccgcacatggcggcacgttcgattttcccgactgggcatcgggtctgtttggcctgtacgaccgcctgtttgcggcaaccgatggggcgatcgacccgtgcgtgggcgaggatttgattcggcttggctacgacgagtcgtattcgtttgcggctacgcccgatgccgccgaacatgcaggcgcgatccacggacgagccgtttggtcagccgacgttgagcggcacggcaccacacttatcacccacagcccagtcgcgctcgatttcggtgcgtgcggtaaggggtatttggtggatttgcttgcggggatgttgggtgatggcgcgggccaccctcaacccattcaatacgtcatcgacgccgggggtgatttgctagtgcatacggacgaaccaatcaccatcgcccttgaagatcctgccgatccggccaacgccgtaggtgcggtcgaaatcagccaaggtgcattctgcgcgagctcccccagccgccgccactggtctgacgccgcaggtcaccaacttcaccatctgctcaacgccatcgacggactaccggttgacgatgtagccgccacatgggtggccgtcacgccgccatcgagcaccataaccacgaagacatcgacgcatggcagcaatgcctcgacaacggcaaaccacgataccgacgattcgtcgaacaccgttgcagcacacgtccctgtcacactggccgacggactcgccactgctctgttcaccacctcggccacccagctacgcgctcattttcccttcgaatgcgccatcctcaacgccaatcgtgccgccgcacaatcccccaattttccgggcggttttttcacacactaatgtacgaaatcatcagtatcacatccagtggagcattccctcgggtggaccgatgggttgctccccctcagtcagctacgctgacggctcccctcggagaggggagccgagtatagctaatccgctaatccgctaacgcaggaaacaatccgtcagtcagcgagcgcgaactggctgttgtagaggtcggcgtaaaaaccgcccgccgccagcagttcatcatgcgtgccgcgctcgatcacgtcgccgtggttcatgacgaggatcatgtcggcgtcgcgaatcgtggagaggcgatgcgcgatcacaaagctcgtacggcccacggtcagcgcatccatggccttctgaatcagctcttcagtacgggtatcgaccgaggaggtggcctcgtcgagaatcagaatcggcgcgtcctgcaccatcgcgcgggcgatggtcagcagctgcttctggccctgggagagcgacgacttgtcatcgagcacggtgtcatagccgtccggcagcgagcggatgaagtggtcgaggcccacggccttgcacgcatcctcgatttgcttgttggtcacgccaggcttggagtaggcgatgttctcgcgcacagtgccacggaacacccacgtatcctgcagcaccatggagaactggtcgtgcacgttccagcgcggcacggacttggtgtccacgccgtcaatcgaaatcgaaccgccggaaatctcatagaagcgcatcagcaggttgaccatggtggtcttgccggcaccggtcgggccgacgatggcgaccttctgaccggccgagactgaagcggagaagtcgttgataatcggcttgcccggctcgtagccgaactgcacgtggctgaattccacgtcgcccttcacttcgtggccgcccatgtagttcttgccgagtagggcctgcttgccggattcgtcttccatctccggctcttcaaggaaaccgaacacgcgctcggcggcggccgcgcagcgctgcaggttctggaaggcctgcgcgaactgcgaaagcggctgagtgaacaggcggatgtacatcatgaacgccacgatcacgccgaactcgatctgcccgtcgagcgcgagcgccgcgcccaccacgcacaccaccacgtagccgaagttgcccacgaaattcatgagcggcatcatcaggccggagaggaactgcgacttccagccggactcgtagaggtccgagttgtacttctcgaagcgacgaatcgaatcggcctcgccgttgtatgccttgacgatgaggtggccggcgtacatctcctccacgtggccgttgacgtcacccagcgccatctgctgccgggcgaagtacttctgggaggacttcacgatggccatcatgatgatcaggccgatgaggctggcaccgatggcgcacagggtcatgatcacgttgttgtagaacatcatcaccagcgcgcccacgaacagcgtcaccgaggtaatcagcgagccgagcgactggcccagcgtctggccgatggcgtccacatcgttggttatgcgcgacagcacgtcgccgtagctaaccttgtcgaagtatttgagcggcagtttgttgattttgaccgagatggactcgcgcagtcgctgggcggtgcgctgggtgacgttggccatcatccagctttgcacgtagccgagcacggcgtagcccacgtacagggccaccaaagtccaggcgatgtggcccaccgtgccgaaatctaccgagttcatcaccggtctgccgttaacgatggcgggcagacctttgacgatctcgttggtcatgtccttgagcttgtccgggccgacgatctggcagacggtgccggccgcgcccaggatgagcgcgatgatgatgacgggaagatagttgcggcagtagttcacgagtttgcccatgactttgccgaaatcatggggctcttcgacggcacgcctgccgcccattggtcctcttggcatttgttttactccttaaaagtccgtattgacctccctctgatgaaggaggtggcgcgaagcgccggagggagagaagccgtacgcgactacccctcagtcagctgtgctgttttattcgctcgcttatcagctcgtcttcgcctgggaacagcccactgggctgttccctttacggctcagcccctgacatggggagctaccgctgccgccccccctacgccgtaagctccgactggctgagctgggattcggcgatctggcggtatacgtcgcagttgtcgagcagttccttgtgcgtgccttgacccacgaccttgccgtcgtcgagcacgacgatgcggtcggcgttcatgatggtgccgatgcgctgggccacgatgagcttggtggaatccttggcctcgcgggcgagcgcgtcgcgcacttcgcggtcggtcttgaagtcgagcgcggagaacgagtcgtcgaaaatcaggatttccgggtgacggtacaccgcgcgcgcaatcgacaggcgctgcttctggccgccggacacgttcgatccgccttgggcgatcgcggcggaatacccgccgtccatgcgcgccacgaactcgctggcctgcgccacgtcggcggcggccctgacgcgattcagctgctcggccggtatatcggcaccttccgcggcctcgccagcggcgatcaacgcggcctcgcgcttgcgcccggccggggtggaggtatcggccatctcgacctccgccgggtcgcccggctgatcgccgtagctcacgttggaggccacggtgcccctgaacagcacggactgctgcggcacgtagccgatcttgtcgcgcagggccttcaggtcgtagtcgcgcacgtccacgccgtcgaccaacacctggccttggctggtgtcatagaagcgcggcacgagattgataagagacgacttgccggagccggtggagccgatgaacgccaccgtctggccctgctcggcggtgaagttgatgccttccagcatcgcctcgcgcgaatccgggtaggtgaagctgacgttgcggaattccacggtgcccctctggccggttttggccacgtcggcggcggttttggtgccgttctcgacgattggctcagtgtcgagcacctccatgatgcgctgcgcggacacgtcggcgcgcggccagagcacgaacaccatgctcatgagcaggaagctcatgatgacctgcacggagtagttggagaacacgaccatgttggagaacacggtgagcttgtccttgagcccggcggcgtcgatgaggtaagcgccgatccagtagacggcgagcatcaggccgttcaggacggtgttcatcaacggcatcatgaacgccatgacgcggttggtgaacagctgggtctcggtgaggtccttgttggccttggtgaatttggcttcctggtagtcctcggcattgtaggcgcgcaccacgcgcaggccggtgaggttctcgcgggccacgaggttgatgttgtcggtcagggtctgcatgaccttgaacttcggcatgaccatggccatcatgacggtgatggacaccagcaggaccgccacggcgatgccggtggcgagcgtccattcgaagccttcgccggcgatcttgcacacggcccatacggccatgatcggcgacttgacgatgagctgcaggcccatggtgatgaacatctgcacctgcgtgacgtcgttggtggaacgggtgatgaggctggcggtggagaacttgctcatctcggccgggccgaaggactcgaccttgcggaattcgagcgagcgcagacgctgggtgaacgaggcggccacgcgcgcagcgatgtagccggtgatgatggcacacgccacggatccgagcgagatgagcagcatcttgccgcccgcgatccagatgtccttcatgtcgctgcccggcgtctcgaccagcgtggtgatgtctgacatatagtcgggcagtttcaggtcgaagtagacctgcccgacgatggtcaccagggcgatgagcatctgaccgatctccgctttggagaggtatttcatgatgcgaaacattggtttccccttgtgttggttgggttggttattggttattggcgattggttcttaagttggctgggttatcggtgattatcggttcacgatgtcttaatagtttccattgtttgattacttacactgtgagatattacgcgcacttctgcatgttcgctgtgagcgtcctcaattaccttcacctccctctgacgagggaggtgtcaccgcgcagcagtgacggagggagagacccgccagcgggaggaagctagtctcgctcagcctccgcgcgcttagctgccatgtgttcagccacgcgcttgtcccgctccacgaatgcctcacgcacttgttcagccgtcggccgaggccgccccggatggcaaatcgacatatatgtggtgaactcagacaccaggtcaacgaattcgcgcgtgcgccgctcccccatttgcgagaaaatccagcaaattgcggaacgcatttcctctatcatccgatgagactgctcgcgcccggaatcagtgagattcacgcgaataatgcgccgatccttggaatcaatgtcacgcgtgacccagccttttttctccagagacgacagcacagtggagatgcggccggaactggcctgcagcgccgatgccaattgcgatggcgtttgcgtccccttcatggacagctcccggagcacgaactgctcaccatgggctccacgagtgaattccctctgcattgtcgaacgattgccccacacgctggcatacagttcactaactgcttcctgctcaaatcccataagagcaccatccattcccattcgccacacggcagagcgccgcaaacaccccaagaatatctcacaccgtaaacaattcattactagaaactatttttggaacgcataatgcacacactccacgctctttgatattctgaaagccgcatagatattcacttcggggcgtcgtctaagaatatttgctgggccaacggtagcgacgttggcattgtgctccatgaggtatctggtcgaaaaggcggacgaagacagaccagttgggcggagcgcgcccatacctcaaaaccattgcaattattggctttgaccattttcgtggagtcacgaaaatggtcatgaaaaacataaggacacacccatgaaccgcgacgaaatcacacgcaaaaccagcgaactcagcactatcgcacacaccaccgaggactccaaagttgagtattggtatgcacgcgagctaatgacctatatggggtacgacagatgggaaaacttcagcaaagctattacacgagccaagcaagcttgcgacaattccggcgtatccgttgaatcccatttccgtgacactacgcgagacgtgactctcggcagcggtgccacccgctccatcgcggacgtcaagctcacccgatacgcctgctatctcattgctcaaaacggtgatccaaagaaagaagaagtggcacttctccagagctattttgccgttcagactcgcaaaacggaaatcattgagcaacgcatgggagaaatcagccggctcgccggtcgagaggcccttgccactgcagagaagaaactctatccgtatacccaaatcacacacaacaaaaccgcacaagagcacatgtacacgcccaaccacgccgcagaacgccggcaaggatgtgatacaggccacagaaagcgttgtaccgcctaggcaatgcaacaattgtccgctatgctctgaaggcagatggcggcacggatgccatcccaaagagggggtatgaccatgattcggggtatgaacctatgcagcatcgccggctgcacgcacgaagcagaagaagcgggcatgtgcaacatgcatttcacatcggcgctggttcacggagcgctgcactacactgcgggcggacgtccgtcgcactgctgagcgcaacaacaaagcaaaacaaccagtaacgctcaacggcttccacatgttcatgctctaattgcatgtacttgcagacacaatggccggtctgagccagctgccctcgcatggagcagctggctcagaccggccattattgttgctttgtactgtttgcactgtattgcgcctgcattgcgcaagctcgggcgcactcgggtgcgctcgctgagtggcgtgaatcgcagattgctcaatagcaacgcaatccacgccactcagcagttgccatggttatgcgcggcgtttgcggatgacgagcaaggcaccagccgcagctgtcagcaccacaaccacgaccgcaatggcagccacggcaacacccgtattcgaaaggggcgcagcgccattagcagccggcttattcgtggcagtgttaccgggcttagcagtgttgccaggattgttggtatcgccgggcttctgctctccagggccgggagtgacctccgtggccgtgaccgtgacttcgaacgtcgcgttcacgccacgataagagacggtgatggtcttcgtgcctgcggtggcagaatcaaagccagtgaacttcagatcaccatcagttggatcaatcagcttgcgcagcgtttcggtatcgccgactttgtaaatggcggataccttcacatcggcagcgttgaacttatcgcctacctgataggaatccttggtcacttccacagcaagctcggccaactgaggcagttcgccgaatgtcactgtgtaggtttccgccgtgccatcctcagcagttacagtcaccgtggccacgccgctgttctcggtcgaagcctgctccacctgcaccgtagccttcgcgtcagcagcagtcgcctccaccgtcgggtaagaagcagcgtctccggccagcgcaccggcatattcggtgatatccgcggagaatccgtcaaccgtcttgccatccacagtcagatcagcaagattggcgttactagacggctgcggctttggcgttgcttcaccttcggcgatgcgtacttcagcgatcttggcatagtcattgccatcggcgtaggtgaagttgaggcgaatgcccttggtggcgggcagagcgctcacatcggcttccgtcacggctccagcagcaccattcacagtgactgccggcagcgtggcatcagtccacgtggcgttgtcttcagctaggtacgatacagtgaagctcttcggagcggcctcgcccttggccttatccaccgcaacgctgagcttgcccagctgatatgccttatcgaaggtgtagctgagccacggcgaggtgtcgccggtgccccagttcgaccagttggtgctcagattgttgtcgcaagtcaggtcggccgtagaagcggaggcccagctgctggccggctcatacttcgaggctgcggcggacgagcagaacaaccgggcaaggttgctttccacagtcacggtgagcgtggcagttactgaagaatcagtgacaaggcgtaccgtcacggtttgctcgcccaatttggtggtgtcgaagccttccaacgtgtattcatctggctccagtacacgcgtcttgccattggtgagcgtagcggtaaccgtcacgtccttatgcgcgagcgtctgcctcttggcgatagtggcttcagggcccttggccgcgatggactccacagcagcagtctgcgaaccgaacgcagtgccgttgaaggccacggtgaatgcgccggcattgctgttcgacgtggcgaaagcaccggcatcgagcccggttacgtccgcaccggtcagcgttaccgtagcgacatcctgccattcatcgttcgcggaagcacgccagtagcctttcagagtatcggttgaggtgcgctccagcttgagctgcacttggtcgccgaagccggtaccaacatgcgatgtttccttatcgatgtagccatcggcattggaatcgtactgcatgtaaacgccgcttgggctggcaagtaacgtggcatatcccttgccgccgttagcgccagtaagaccgttacggaccaccagaccggcgcgcggatcgccattaccgcccaagtcgagcggcttgaccgtggtttccagcgtttcgttcacgtccagagcatcaggctggtacaccgcactgccctcgttgcgatccgtccagacaccacgattggcgttgtccgtaatcgtgaagtcataagcaccgccggacgcagaaacctggcacgcgctgccgcccttccaatgagcttccttccaacttccggaaatcgggttggagcaggaaacatcgatggttctacggaatgtacggcccggattgaagttactgctctcggcaagagtgcccgtaatggtgtaggttcccggcacattgaatgcgtaggtgttaccagcagccttggtcgacttgctgactgccgtaccgccttccacattccatgtcaccttggtagcaatggtatcgtcgccttccttgacgttgacggtgtccggcagagtaacggttccgcccgtgttcacggtcttcgggagatcatcgccggtttccacagtccagttgaccagcttgcccttggcgctaccatggttgccccaatagctcagatcccaaccgtcgggctcgccttcttgagcaggattgtgcatttcgatggtgccgttctcaccgatggtcagcggcagccaaacataggtggaatcggctttaccggaatcccaacggtcaccaaggtagatgaagtgacctttctcctggtctactgcgagcacactagccgactgcgaaccgaatgtggtgccgcgggtatcgcccacggacaacagaccatccgcgccttccggcatgttgttgtaccacgtgttctcgttggcatcgtccttttccacgccacgggtccagtttcccagcatggagtcggcggtgtagtaggtctgcttgttcggggcccagccggttgcaccagatgcgatgatgttgtaacgcccgtcatattggaatacggcaggagcttccagcgaaccattttgtttgacgatttggaaatcttcgccacgcaccggggcatccgtagtagcgtctgcaagaatgtatgggtactgcccgtcagcagagtactgcttttgtccctcggactggtccacattcgtggtcttgactacattggtgtaatcatcgttgagcttggcgatgtacagcgtggcattggcttcggaagaatacagtacataggcactgtcgtccttcgggtccacgaacacagtcatatcgcggctgtcaccgttctcaccccagctggggttacctgcggcttctttccaattgttctggttaggcaaacgataggcacccaccatagtgaacgggcccgccggattgtcggaaacagccacgcccgcaagtgcacgtgcatagttggaaccgcccggcgtggtgcttccatcggaatgccaccacagcacgtattgcttgttcttcttgttgtagatgatcttcggacgctcgaaaatgccctgtacggaatcaaccgcgccatcaccatcctgatcggggttggtgttgaggtacgggaagattgcgtcggccttggcagcgtccacactgccgtcggacttggtcaggttgtaggccttgtcgaagtaggcgtaatcggcattgctcttatccgtcaactgagatttgctggtcaccgcacgcagcgccacaccaagatcggtccagttgtatagatctgtcgacatataagcatggacaccggggctgttgtcgtaaccgttagaacggtcttcgccataccagtagtaggcgtcgccaaccttgaccacttggccaccgtgcgcttggatgtgtgtgccgccattatcattggcgttcttggtataccaatatggctggaagtaatcgctagcgttcttgcccggatcggctgtgggctggaacttggtgtatgtcggcacttggccgatggtaggcaggtaatccacacctgccgcactggcacttgcagcggccagcccgcatgacaatagcgttgccgcggcggtaattgccgcgataagagcgcccttgcccttattgtttatcttcattgatttggttccttgattgatgataacggttttttgaacaaacagttatgtcgctatccgcgaagccagaaaaggttcgacaaatcaatataccgatactgaaaattcagtattcaacttgtcggaccaattatggtcaaagagcggaggaaccggccggcaatagtcaatattgccggcttgttccttcacccattactgcgcgagggtactatgcacgcttgcgcagcatgaacagtgcacccgcggcagcggccagcagagcgacagcgccagcgatggcggcaacactggaaccggtgttggccaccgtgttcttgttgccgttgccggtggcaccgggcttgttggtgttgccgggcttctgttcttcagggccaggggcgactgcgttggccttgaccgtgacgttgaaggtcgcggtcacaccacggtaggagacggtaatcgccttcttgcctgcggtggtggagtcgaacgagccaatcgcaagctgcgggtcgtcaagagcgaccggcacttccttggtcttgtcgccactctggtagacggcagtcaccttcagaccggcggtatcgagcttgtcgccgatggcgtactcggtcttcgtgggtccgatcaccttgagcgaagccaaagtgaaggcgttgaaggtcaccgtgtaggtcttcgtctcagactcgtcggctgaggtcaccgtaatggcggccttgccgccaagcttgccgttctcaaccgcgtcgccagtcaccttgacggcggcggcattgtcggtggcgaaggcctgcagcaccgggtttgcctcggcgtcgaccggcagatcaaccgtgtagtcggtcttggacgggtcgaagccttcaacggtttcgccgtcaagacgcaggtcgcccagcgtggcatcggatgctggctgcggggtgagtaccgtgctgtcttgtgcgaacacctggatctcagccacgttgatgtacaccttggtgtcctgcaatgtgttagtcaggcggatggccttggcctttaccggggtgccgagcacgaagtcaacggtcggggtgtcggcggcggtgatgccgtcggagccagagccggcatcgccggcctgtatcttccagccatccttggtaccgactccatgccattcgccagcctcatcctggtattccagcgtctggctcttcggccaagacgcacgaccatcgtagtagaagaaggtcttcacttcggtgatggtctgagcttcgtcgaaggtgaacgtggcgaccgggtccaccgtcgaggcggtggaagcccaagtggaccaaccctttgacgtagtgtcaccatcgatggccttggaagcggaggcaccctcctggaagttcaccgagaagttcgtgccagaggccgcggcgatgttcttcgcagcaccctgaaccggcgtcacgaatgcctgaatttcggtggcgttcatgtagtcgttgttcacggtgttcacaatgcgcaccttcgtggcattcactgtgcccttatcggccttgaacgtcaccgtctggcctgcggcaggcttaacatcgctaccgaattgcatccacgtctcgccatcagtggtgtactcggccttggcggaagccggagccttgtcaccatacgtaatggtcactctgctaagctcacactcagagccgaagtcaatcgtggcggtcgggctggcggaatagtcaccagcagagttccacgtcacccaggcttcagctgacgtgtcaccatcggtgagcttcttccactgatcgcccttgctgtattccgtctgctggttggtcacggtcaggctggaagcagtgtcggccacattctcaggcgtggcggcggtgacatagatcgcgcccttcagcgcaatcgtggtcgcgtcgtccagctggtaagtaccggtcacggcaatgttgtcgccagccttggcatcggcgagcttggtatcaagcccatcgaagttccacgtaaccttagccgcatcgccctcgaatgcaggcgatgccttgacgtgcagatacaccggcgcagcctcaagcgcggccttcgcctcgctcgcactggtgccggccagcactgtagccgataccggatcggaaacggtgagcgcgccaacgtagaccgtagcggcgacattgaactcgttgccgtacacatcggtggcggtagcggtggcttcgtaggcgccttccttggccacatcgaccttggaagtatcccagttggcaaccgtggccttgccttcgccccaggtgtagtagagcgtgacttcggtcggcagcgcggccttctcgttaacggcggtctgcacgttcacggtcttctggctggtcggcgttacattgcgtagagtccatgtctggttggcggacggcgaagtgccgctcggtgactgccacaagccaaccttcgtgccgactgtggtaccagagttatccacatcgaggttcgtcttagtcgcggcattgagcagctggtaggtcgaaccatcggaagtgttgagaatccacttggcagccgggtcggacttagcggcctcaaccgtttcgttggaaagcgcgttcgtgccatccttggacaccagcaccttgccttcggcgttagtaatcacataagccttgagatcagggcgctcggagtcggcgggctgctcgatctgggtaaaggtccaagtctgcttcttggcgttctcggcatcggaagcgacgttggccagggacagcgcggaatcaccagaagtggcatcagccacggccttgccggactgcttaccaacgagctggtaagtgtcgccggtctcgacggcagcatccttagcgtagccggtcacgccagtgagctggatggaggcgatagaacgggcgggcacagtgaccgtagcggtcttggcagccttgtcaatcatcacagagccttcagcttgcttgacgttgctggtcttggcgaagacttccggagtggcggaatcgacacccgcgttcttgtcttcggcagaggtttcggtggtcaggtagagctcaccgtaagcgttgtcggcaatctcgccgtacttcgacaggtcgatgacgaaggtctggtcagaggtgccggagttgcggtggatgacggtctgcgtcttgccatcgtcggaggtggcagtcatgttgttgtcttcatcgttgttggcgatgaccttgtcgcccgcgtggatgaagtgggtgatggccttgacgccgttgtacttggcgtttgcaataaccgtgcacggttcaagtccatcggtggtaccgccgttgttgttcacgcggcgctcggagtagagcttgccgtccatgccagccacggtgcagtcgaagtcgatgagcacggtgccccagttggtgttctcaccggccggattcacattcgagcccatctgcatgttgtagaggtcctcgaccacctgccagaaggtgaagtccttggactgcaggcgggtgacgttggagctgatcttgctcatcatgcccagcgcgttgtcgaaaccgtacgggttgtaggagccggactgccaggagccgtccacctcgctcatcgacagcttcttgccgtctgcctgagcgatatcgcgcgactgcatctggttgctgtcggagtaggcgtgaacgttgtactggccgataaggtccttgatcgcctgcgggtactggttgtacgacttgacgaagtcggcggagttcgtggcatcggtggctgcgatgatggtgtcatcattgtccttgagcgcctcagcgagtgcggtaatcgtctgctgctgctgggcgttgctgacatgcataccctcctgcggcttcttcagcgcgttggagtatggggtgacggacctatctttgtcggagtagtacttatcccagtagttgttaatgagcttggtgttgtcatcgctctcatcggtgtacttcgaagccatgtcgcccggagtgccccagtaactggtctcggactcgttgaacggctcgaccgtgtcaacgtttgcgccaaggctttcgaggtgctcgacgttcttggccatgtactgagcgaatttctcagggtttgcaagattattgctaccggagttgcgtccaccagtggcgtaaccgctgttggtcaggaaccacggagcggagttggcgaaggcctctacgtcggtgatgtcagggttatcgccggtggcaccgcgctcaatccaccagtcttgggcggcggacttggagaagtcatactggttgtcgtcagtcgggtcgaatgccgcagccagcttgtctttgtcggcctgcttggtggttacgccattgccatacgtgccggagccggtggcgtcatctttccacgtgccaggcacggcagcgccttggcgcatgaatgggtagccgtaggcaacatcggaggcattgccgccgcccacgttgtagcgggccatgttcaggtccagtccttcatcaccgaagatggactgatagaactgttcgcgcagctgtttgccgtattccacagccttagccttggaagcgtcatcgccgagattggtggtgatggccgattcctcgccgaggctgccggtggcgttggcgaaccaagccagtgaggtgccccagccatcgaaactgttggcataccacgggttcggggtcacggtaatggcatcgttatcagccgcatacgcagtgccggcaaccgcaaacgcccctcctcccactagtgttgccgccgcaaccattgcagcaagcgatttgctcagtaccttcattggtctccttagtgttcctgctgtccgccttataccggaaaaatcggcctttgcttcactgagccggcctctttgcctgatacatgacctacgtcgactccttctttcggcgcagccaaaatgtttacgcaaacattttgatatgagcgattttatcacaaaaccgtcacccagcaaacaacttcagagaccacaaacgacgcacaaagtcatgagccattcgaattgcgctggcccaatcgctacgaatcatatttgccgtagcccttaagtgaatcccactgcatcgagatatcgcgcccgctatcccttccgataacgccgaccacgcgtgttgccttcagcaatcagctttccttgcgcaactaaaccgtttaggaatttgcggactgttctgttatcgagctctgttatcttggcgagttcaggtacagtcacatagtcaacctctgtcaagcgtcgattcatcgccgacagcatcgctgcccgcgaatcaatttcacccgatgcggttgcatctgctttcttaccatccacacgttccccgccaatgagcctcgcaccctcttcggcatctttctcaactacagatctcacgctagcaaaaccagaaccatccacggtcttcagcgcaggaacaataggaatcgtcgcctcgaatatgtcaccatcgcggaactcaggctctcgctcagtatattgccgggacgctcttatcagattccgcagtccgctacccagctgctcggctatgccggtctgcacaaacacattagcgataatcggattctttggcattggcgtgaactcgcccagcttcattcgaccttcaaagaatgagcgcgaagcattaaccgtccggatggattcattatcaatggtgacacgcgccaccaccggactggaatactcccgatgcatgaggctgtttgccaccaattcacgggcgatcatcgtacgcgggctcactcgcttatcgccctttaacacaaagcggtcaggcagattccgctcagtaaattcacggagttgctcgtacgaatcgaacaagttggtccgcaccataagtcggtcatcgtatcggtcaatattgtctcgccgaaccacggcatcagtaatatacgctgggcaaaccgaggaaatgacttcatccttgcccaagagcagcactgcagcaagattaaagccctcttcgccggtcgtgtaatcacgatcgtatagcttggcgctgcggaacagttcttcgtcagacatagttccccaagggtgcccagctcgctgagcgaccgccagctgccgcattcgcgcaatcagctcaggacgcaaatcaaacggagtcacgtaacggaaaattcgccgttcggaatagtagttctgcttgcgaatatacatttgactaatctggatatcgctttcgatgtgtgtatccacatcagcaatgcgatcaaacactgcgcccttgaaccgcacaaccgaagaactcggagctacccaaatacgaacaataatccgttcgtcgtactcgatatgttccgtttccaccattggagccggttcgaacatcttacgattagacactacgttgacaacgttgcgctctatctcactaacgcgcttagaatcgacgccgagcacttgaccgtcatcgtcaacgccaagataaatgctgccaccagaacgattggcgaatgagcatacagtctcaaaagtatccgtatgaggcaattcgctgcagcgcttgaactcgaccatagatgattcaccggcctgcagcacttgcataagttcatcctgcgtcatcgcattccgcccttcatagcgataattcatacattaggacatggcacttatcgtattttagcatctaattagtacattaggacattgttttatgtcctaatgtactaattaggcggctaattgtactaataattgcacactgatgtactaatccgatgatcgaatgcactaattgtccgcacaaatgcactaatcggatgaccgaatgtatcaatgagacctataggcagccgattggctgacgatcagcccagtcattggctatcggccgctagccagtcagccgccaacagccaacagccacccaaccaatagccgccagccaatcagcccgtccaatcactccttgtgttccagtgcggccttcaaatcgcggctacggtagcgttcgcgcagcatagagaatccaccgaagcccacaagccacaccaggccggcaatcgcggaattgcgcgtatcgtccgcaaggaacaacgtcaggtagatgaacacgaagaacacgattgccaccgtattgagcaccttccaagcgggcatgacgaacccgtccggaatgaaatcagcggagcgacggtacttgcggtgtgccatcagcgtcaggatgtagatgaacaggaacaccgcggagctggcggacgagaacagcacgaacgctccggacacaccggggatggcgttgacgatcggcgacagcagtatcagcgctgcggacaccaggatggcgcgggccggcaccttgcgatcggacacctgaccgagcttgttgagcgtcgggttcggcgacacctcggacagctggtacaggtggcggccagccgagtacagcagcgagttcagcgcggaagatgcggcggtgatcaccacgaagaacaccagcgcggacgcccaattcagcccggcgtactggaacaccataatgaacggggatgcgaaggagccgtccttgttcggcttgaacgaggtccacggcacgatgcacatgatggccaccagtgcgcccacatagaagatgagcacgcgcacgataatctcgttgatggccttgggcagcaccttgcgcggattcttggtctcggagacggtgacgcccacgaattcaatcatctcgtaggcgaagaacaccatctggaagctcatgaggaaggccatccaaccgttcggcgcgaacgagaagttggcgaacaggttgtcgaatccggcgtggccggccgggctcacgtggtccacgccgtgaatctgcacggctgggtaatggtagccgatcacgatcatgaccacggcggtggcgatcatcgcgcaaatcagcgtgatcttgatcatcgagaaccagaattccacctcgccgaacaccttgacggcaatcaggttgatggagaccagcgacaccaggaaacacagctcgatcagccatttccaatgggtcaggtcgatgccgaacgtgtcgaagaaggtgatgaagtacgtggagacggccgtgatctcggtcatgcccagcagcacgagcgcggcccaatacgtccagccggcgaaatgcccccacccgttgccaaggtaacgggtgatgaaattgatgaaggtgtgctggctggggtcacggtacatcatttcgccgatggcgcgcatcaggaagaacatgatgacaccgaccagaatgtacacgaagatgatcgaggggccggttagcgagattgacttgcccgagcccaggaacaggccggtgccgatggtgccgccaatggcgatgaactgtacgtggcgattgctcaggccacgctccatctcgttggtctggtccaggctttcgacagacttgagtttgcccgtagcctgctgtgtaccaccattcacattcgtatcggccatactgatttcatttctcttctctgccgcccgattgttacgcaccagacgcgatactcgttcaaaacaagttcaaactgtatcaccgaaatatgtcacgaaaaccgctcagctcaagaatacatgcgatgatactgtaaatattccgccaaaaagttcaattcatcaacaccaaattgaacttctacctctattccacggacttgagcgagctgaccgggtctacgcgatcgagcactgggttggtgaacagctgcaccagcagcgcgaacgccagcgtcgccaccacggcaatcgcatagctgtaccagtgcacttccacttcgaaatacagcgacggcatattcaacgcagcagtcagtaatccgcctatccacctgccaagcggcagaccaaccaccacacccataccggtcaatatcatcatctcgcggttcacgtagttgtgcacctcgcggtcatagaagcccagcaccttcagtgtggccatctcgcggatgcgttcggacacgttcgtattggccaacgtaaacagcaccaccagcgccaggccgccggcgagccccacaatcagcgccaccacggcacccatcaaatcgaacttaaacgtggcggccagatgcgcacagctcacggccttgagcaccgacgattcctcgcccaaccgatccgcatattcggcctgttcggtctcggaacctttcagcttggcgagcatcgcgttccacgtcaaggtcgaggcagtgccatctcccgaagccgaagacgtcacaccgtcggccgcaaacttctggtcgtacagtcgctcactgatgtacacatcagagccgatgaggttgcgcgtcaccgccgcaaccttcaccttggcccgcccgctgccgccattgctcaacgtgacggtgtcgcccgcatgaatatccaacgaattggctgcggacttcgccacaatcacaccactatcgtccagcgctacagtgccgccacccgctttgccgaagatattgggcagctcgaaccacccatcgtcaccggcctcttccagcgtgaccatgtcgttcagtttgttcaacgaattgttgggcaccgtcatcagctgcacggtttcgctttcctgcgccgcattgctcatctcgccgctatccacgcgcagattcagcgtttcggtggcccggccatcttgtgccacctgcttgcgcatcgcggcggcgtcatcgtcattggccaccaccatcaagtcatactggtagatctgctcatattgcttgacgccagtcgtgtcgacggtgtcgttaatcgcaaatccgcagataatcagcgctgtgcaaccagccacgccgcccacggtcataatcaaacgcgacttgaatcggaagatattgcgcgcagtgactttgccgaggaagttcagccggctccataccgggcgaatccgctccaacaatatgcgagcgcccgccttcggcgccttcgggcgcatcagcgcggcgggcgtgtgccgtatctcctcgcggcaggcgagcgcggtgaccacgcccacaccgaccacgaacagcacgatgccggccgagccgtacagccagtcgtattcaagtcgcacaccgggcaatatatacagtccctcaatcaccaccatcaggaatgccgggatgccgaggaatccgaccagcagaccgatgccgccgccgaccaagcaggcgagcaacgcgaacagcagataccggctggacacggcgagtccgccatagccgagtccaaggtaggtgccgataagtccgcggtcttcctcgaccatgcgggtcatggtggtcaggctcatgagcacggcgaccagcaggaacacaatcgggaatgcgcggccgatggattcgatggaactgacgtctgatttgagcgagctgaatccgtcgatcgaagcgcgtgtctgcacataccaacgtgcgttggccacatcgtcgatgcgccgttgctgcttggcgaattcgctttccgcttcgcttcgcttcgcatcgagttcagactgcgcatcatccagtttcgccttgccgtccgcgagctgttgttcgccttcttccagctgccgctcgccttcttcgagctgctgcttgccgctggccagttgggcggcctgcgcttcaagttgcgccgactgggtttcgagggttgcggcattcgcttcgagttccgcggatttggtattgagctgtgcctctcctgcagccgcttcctgttccttggcggtcagttgcgcgttctgctggtccaaggtggattgtgcgggggcaatggtttcgtttaatgtgcgctgcaaatcggctttctgctgggtcagactgtctcgctgcgtttgcagttccgtttgcttggcggccagctgttgccgcagctcactgattgacggcacttcaggcagggtaatgccaaggcgcgcgagcagttgcttgatggcctgccatgtgggtgagttgaagtcgatattcgggtcaagttgcgccagtagattgtcggcctgttgaatcatggacagcatctgatcaatttgtgccacgccttggtcgatttgggtaatgccctgttcgattttcgtgcgattggcagtcagttccgtttgcgccgcatcgagctgtttgcgagccgaggtgagctgcgctttgcccgattcgagctgggtgcgcgcttcggctatctgctggcgaccttgcgcgatctgttgacgggccgatgcaatctgcgcacgtccatcggcgagctgccgttcgccatcggtaatggttgtcctgttgttctccaattcggtacggctatcttgcaatgtcgtttcgttggcttccagctcggcccagttgtcgtcgatctgcttctgggcttcgtccagctgctcgttggcctcgtcttgggcatcgtccagtttgcgctgcgcgctggagacgatctgttgacgacgggctttctggcgtgtggtctgtatctgatgttcgatacggtcggccacggttttgacggcttcatcgtaggcatcggaaaacgtgtcaaaatcggacgcaccagtgacggcaaccgatatcgcagtgtatatattgccggtcacgccgtcgctgggtgcaaagaacgtatagtcctcggatgaggtggaccggaaggaggtcatgcccgaatagccgtctggattgttgaggtcgcgcgggtcaagtacgacgccggtgatggtgagtttcgtggggaactgcggggattgctcggcgtcggcgtccgtattggcggcggacttcgcatcggatgccgaggcattggcggcgacacctaccgtatcggcattattggaatcgtcattggaatcattattggaatcgtcagtctccgtggccgctaccgatatgacggatgaagaggtgtcttgtggcgtcacagtaatggtgccgccaatcttgagtccgctatcgttcaggaactgctgagtcaccgccacttcgccggccttgttcggcagtttgccttgttgcaggtacggctgatcaagcccttcggtaccgatttcctgcatggtcacggttttcttggtgccgtccaccaacgtggtcaccgtctgagaacgttcgggctgcacggtttgcacaccgtcgattcggcgcagtgccgttgcatcatcatcggtcaggccgtatgtggatagcacctgcaggtcatgcagtccctgctgatcgtaaaaacgaccggccgccagaaaagcatcgcggcatccggcgtagatgccggtcagcacggccacgccaagcagcgtgatgacggcgatcgagacgaacctcttccagctgcgcagccagcaacgcaacgtatctttggcaaataccgcagaaacgcccgctcctcgaccgccgctatcgtcgaggttccgccgtttcacagaatgtttcacaggttgtttcacgaatcgcctcgcttgtttcacggggcgtttcacagagtgtcttgcagtgagcatcgccaatcacctaccattcgatatcggcgatgggccgcggcgttgcgttgacctcctcgctggtcaccttgccggagcggaagcgaatcactttgtgagccatcggtgcaagcgcggaattatgcgtgatgatcattacggtcatgccttgtgtttggcaaatatcctgcagcaactgcagcacttccttgccggtctcgtaatcgagcgcaccggtcggctcatcgcacaacaacagcttcggctttttggcaatcgcgcgggcgatggatacacgctgttgttcgccgccggacagttgtgccgggaaattccccatgcgctcccccagtccgaccttgtacagggtttccgccgggtcgaaatgatcggggcaaatctgtgaggcaagttccacgttctccagcgcggtcaggttcggcacaagattgtagaactggaagacaaagccgatgtcgttgcgccggtaggtcaccaaatcgcgcttacgcaatccggtgatgtcgcgatcgcccacaatgacgcggcctgaagtcgcggtatccatgccgcccagaatgttcaacgccgtggtcttgcctgcgcctgactggccgaggatgacgcttaactcgccttgatcggcggtaaagctcgcctcatcgagcgcccgaatcacgctgctgccggaggggtattccttgaccacatgatcgaattcgatatatgccatcacgcacctccaacagttcccaccacggcccgctccattcgcaatgccacctgcgttcccttgctatactcaagtaaaacaacactgtgtcggttctgcaaccaacagttggattgtgagttgtcggaacttggggagaatgccatggccaaggatttgacggaaagccgccgcacccgatacacacggctcgccatgcaagacgcgctcgtcgagctgctgcaggaccagccgcttgggtccatcaccgtcaaggcattgtgcgagcgggcggacgtgaaccgttccacgttctatgcgcattacacaagcattgaagatctactgcacgatatcgaagacgagaccatggcctgggttactgccgcgctcgaccagttgctcgcgcagcctgattcagccggcatcgagcacgtcatcgaacgtatctgccaatacatcgccgacaatcgcaagcatctgcaggtattgatgagcccgaaagcagatatcggcttccaacagcagctactgggacttatttacagccggcagacagtcgccgagcagctgcagcccgccgccaacgacccggtcgaggcccaaatgcgcatgcgcttcgccgtatccggcagcatcggcctactgcaatactggctcgccaccgacctcgcagcatctccggaatcagtggcccacaccattttcaccatgggcatgcccgtctcgcagtgaattggtggggatggtttgataggccactgccgactttagctgtttcgatcaaacgcgaataccggtatgggctggcatcggcattctttggcattacggcatgccgcgccttacaatgacgagcgttgcgcatggcgacctcccgccggtcatgctaaaaatcaaagagactcgagagaagagcacaatgagtactgctgatgcgcctaagaagccgcgcgaaaccgacgacgtgccggtgccggccacgctgcgcaagtcactgaagaaccgtcatatccagctgattgcactgggcggcgccatcggaaccggcctgttctatggttccagcgaatccatcgcgctggccggcccctcgattctgctcgcctacttggttggcggcttcgcaatcttcatgatcgtgcgcgcgctgagcgaaatgtccgttgaggatccgaaggcgggcgcgttcagctactacgccactcgctactggtccaagcgcgccggcttcatctccggttggaactactggttcaattacatcctcgtctcgatggttgagctgtccgtggtgggcaaattcgtaaactactggttcccggcgattccgacatgggtgtcggcggccgtgttcttggtgattatctgcgccgccaacctgctgggcgtctccaagttcggtgagttcgagttctggttcgccattatcaagattgtggccgtgatcgccatgatcgtcggcggcctggccgtcatcatcttcgctctgcccaccgcatccggcatcaaagcgagctttgccaactggttcaccttggaagggggcttcttcccgaacggtctcatggagcagactaaggacggcacctggaccggcctgttgatggcgcttgtcgtggtgatgttcagcttcggcggcaccgagctcatcggcatcaccgccggcgaaaccgaggaccctcgtcgtacgattccccgcgccaccaatgacattatctggcgaattctcgtgttctacattggcgcgctcggcgtaatcatggccgtaataccgtggaacaccatcggcggagacgatgttcccagcccgttcgtgcaaatcttcgattccgtgggcatccacgcggccgccggcatcctcaacttcgtgtgcctgaccgctgtgatgagcgtctacaactccggcctgtacgccaactcccgcatgctgtattcgctggccaaacaaggcaatgcacccgcgtatctgggcaagctcaacgctaagggcgtgccggtggccggcgtgctgacgtccgccgtgatcaccgccatcgccgtggtcgtggtgttcgtgtggcctgagttcgcgttcaactatctgatgtcgattgccaccatcgccggcatcatcaactggacgatgatcatgttcaccgaaatgaagttccgtaaggtggtcgccgcgggcggcgctcccgaggattccgaactggccggcaagtccggcaaggaagcgctcgacgcgattcacttcaagctgccgttcgccaaagtaaccccgtgggtggtattggcgttcctggcactggtcgtggtgctgatgtgcttctccgccagctaccgcgtcgccgtcatcgccggcgtgatttggctcgccatcctcttcgccgcctaccagatcactcaggcgaagagataagccccccctattgcaaaaaactctcaggcgggttctagtgatcgttgcaacacctgacctaccgcaaggagggtcaggtgaccagaagccaccgaaacgaagaccgtggcggggaacaccgttggacgttcaacggcgtcgaatatccgacgaggaagctgatgtgcgaggcgagacgcgccgagtacgtgcgcctgctggacgaggaaggcatgaacttcacccaggccgcgcacgcggtcggcgtctcgaaacgcaccggcaaggcgtggcgcaacggcaggacgcgcgccacgggaaggaacgagaaacccctggtggactggtatcgttccaccatggacaaacccaagaccctccatccgcgatacctgagccaggaggagcgcatccagatcgcggaccgtctgcgtctgggcgattcgatccgcgccatcgcccgcctgctgggccgcgaccccggcacggtcagccgcgaggtcgagcgcaacaggaatcccgagtccggcggttacgagccttaccgcgcccagcagaaggccgcggaccggctcaaacgccccaaaccgcgcaaggcggccgagggcacgcgactgtgggacgagatcgccgccgggttgcgcaggcattggagcccggagcagatagccaaccggctgaggctggacttcccggataatggggatatgcacgcgagcgtcgagacgatctaccaggccatctacctgcaggccgggggcgaactcaagcaggagctgaaacgcgccatgaggcaggggcgaaccgcccgcagaccccaaggcggccaaggccgcaaaccccgtttccgcgaacccatggccatgatctcggagcgacccccggagatcgaggaccgggcggtcccgggccactgggagggcgatctcatcaccggcagccgcaacaaaagcgccatcggcacgctcgtcgagcgcaccaccaggttcacgatcctgctgcacctgcccgacgggcacgacgccgaacacgtccagcaggccatcatcgacaagatgcagcacctgcccaaactcctgcgcaacagcctgacctgggaccagggagcggaactcgccctgcacaaacggatcggcgcctcgctggacatggccgtctacttctgcgacccgcactccccgtggcagcgcggcaccaacgagaacaccaacgggctcctgcgccagtacttccccaaaggcaccgacctatccgtctacccggaggactacctcgacgcggtcgccgaggaactcaacgaccggccacgcaaaaccctcgggttcatgaaaccaagcgagaagatcatcgaactgctcgacgccgcgtgataacctcaacaaccgacaacgtgaccatggaaggccgctcaaacctcaggtgttgcaaccaccactagaatctgcctcactgactcaacgtcagtgagagttttttgcaaatgaggggtcagatacggcgcttgcgccagatggtcagggcgataccggcggcggcgaggaccaccacggtaccagccacgccgaagacggcggcaccagtgtcggagatgacggcacccggcttcttgccatcagcggagaccttcacgagggccttgcgggcctcggtcaggtgacgaatcgcatcctggacctcggtggaggtggcgttctccttggcgagcaccttcttcgcttgggccagcgcatcggcgtaggccttccacgaatcggcggtgtaatcgtcctggttcagattctcggcttcggccttggcaatggcatcttcgagctgcttgagctcttcctcagtggccagatcgggatccggagtcggcgtctcgtcggcaacgaccttcacggtgaacgtggcggtcttggtcgaatcggccacagactgcacggtcacggtcatcttgtcggaggccttcgaggagtcgaagccgagcagctcgtactcatcggcggcgagctcacgggtggtggagccgccgttgccatcggccacggtcgcggtgacgaccagaccggcaacgtcgagcgcttcaccaaccttgtactcggccttggcgggctgcgcggtcacggcgatggagaggatcgtgcctgcggccgggtgctccggctcgggctggctctcctccaacgcattctgcgcgtcggtcagggccttggcggcggcatcgacatcagcctgagacaggccggagtcaaggaaggtctgcttggccgtcttggctgcggcgagcgcatcctcgaatgccttccagctggcctcggtgtaagcagagccatcggcgccgagcttgtcggccgcttcaatcgcgccatcaagcgccgtcgtatcggccatctcaatggacacgccttcgtcggtcgggtgaatggtctgcatcaggccgtccgcgtcgaaggtgatctcgtcgatggcggtttcacggtggtagccgaggccggaggtgaacacgccgagcggcgtgtagtggcgatggtaggccatgagccaacggtcgttgccgtccgcgtcggtcacatgcacgtcggactggtgcgcggtaccttgcaggttcttggaggaatccttctgcagcagcacacccttgtaggtgatggtgccgtcgatggaatcggagacgccgtacctcacatggtagttcggggagttggcatcgtcgcatgaccaggtccagtggtacttgccgtcgcggtaggcgacgaccacggactcgcggaagtcgttcagaccgttgagcttcttcaccgtaccggccttgatgctcaccatgtcgtcgttgagttcggcgatggcgggcgaaccgttgccgtacaggatgtacgacttgccggtgttcgggtcggtgaagatggacgggtcgatggcctgtccaacggtgacgccttccatcgtgcgagtgaccagcggctgatcggcggccttgaacggaccggccggattgtcggccacggccacgccgatggcggactgaccgttcggcaacttcgcgcagtagtagaagtagtacttgccgttcttcttctcgatggtcggtgcccacgcggagcccacggaccacggggagatggcggtgttctcatcgccatcggtggtcggctggtggtccttgttgacatcgaggatcacgccctcgtcggtccagttcaccaagtcggtggagctgaacgcatggaagtaattgccgctccagccggagaagccgtcggtggtcgggtaaatccagaacttgccgtcgaagtagtcgatgtccgggtcggcgtactggccgggcagcaccgggttgttgcccacggtgaccttcttcagcgtccaggtttccgtattaccgtcacccaaatcgacaaccaaagtacggtccttagtcaggtcggccgtaccaccattggtgaacgcctgaccatcaagggtgagcttgatggagtcgtcgccacggttgacggtcaccttgacgggcaccttggccgcgtcgccacggcggttgagcacggtggtgacggtcttcgcggaccagtcgagggtggaacgcacctgagagtggtcgtcagtgccacgcagcgagttcgggtcagacggcacagtgcccacagaaataccctgcagagcaatcgggctggtcttctcgacctcctgagcagtgagcgcgcggttccacacgttcacattgtcgaacgaacccttgaagtatgggtcgttgtagaaggacttgcccaagtaggccagcagatcgttacccaaatcggtgaccttgttcttggtcgccttgttctgagccacctgcgcaccgtcagagtacacggtcatcacgttgtcgtccaacgtgaccgtgacacgatgccatgcgccgttgccagacaacgtagcgttagccgcgtcctccgcaccatacgagttggtggtgatgcggctggcgagctcgccggagttgttgtacttcaggaagtagtacttggtggagttctggccgaaagcgaacgtgaactggtttttattgatctccgacttgacatccatctgcacagtcagcttgttacggccatcgaacaggcccttcgggaactcggcgtaggtgccgtcagagccgtcgagcttaagcaccttgcccttttcggcatcctcggagaccttggcgttgccgttgaaggtcaagtcgttgctgttctcagtggtgtcggtacccttgctgtcttcgaagtcatactcggcaatcggaccggagccgtcttcatcgggtgtgactggctcggtgtccttgttcttatcgaatgccttcaggattgcgttgtactcggtttcagtgacaggcaggatggtgccgtgacgcttcttgagcgaaccgaagttcacatcagaggcaaagccccaatcagccttatcagtgctgcctaaatcggcagaacggtatggggtgtaacccttaccggctgagtactggtcccacatcagaccgtagagcatcttcttgcccgcatcactggtctgcacgtcatcttcattgtagaagaacagctccgggccttccagctgcgcaccggtcagaccggtaccagtcaggtcaccgaatgtaccgacaagcgtccactggttcggatcactgtcagtgttgtagtaaccattcgcaattgtgtcaccagtggtgagcgttgtggcatacggatccttgctacgctcaacaccgaggtacgtgtcaccggacacacgatagtaatagccgtcatcggccttaatcatcgtggtatcgataacggacttgactcggtcgatccacttgacaggcgtcgtgaagttcacgaaatcacgcgtggtggagtagtacatattggtgcgatcgccggacttgttgtccgcgtcggaagcagtggcccagtacaccatgtactgcttgttcacatcatcccagtaggcttccggagcccaagccatgccggctcccggaatctgagaggcaacgtcaacggcgcgcggttcgctccagttgacgaagtcatgcgactcccacacgattaggttggtgctgccattggtggtagcggtggccgcgccccaaccgccacggttatggatgctcagctcggtagcgatgaggtagacggtgtcgccttccggagagcggaccagatacgggtcgcgcacgccgttgtccttaccacgagagttgccggtctggctgttgttccagctgagtaccggatcgccggactcgcgggtgtcatgccagctcaggccatccttgctggtggcgaagtacatctgctcgtcggtagcgctaccttcggtgccggtgaagtgcgcaaacagatagtccgtggtcttcggctgttcgacggcggccttgacggtcagctcgaattccttggtttccgtgttgccgtcagcatcggtaatggtggcagtgagcgtcaccttggtgtcggttttctgacgagcaacgacaccagctgcgatgtcaccatctgccgcatcggtaatgacctttgcgttgctggatttccacgtaatcgcggaaccgttaaccgagcccttggccggaagtgtgatgttggaatacacatcagtgctgccgttgttaatggtcagcgcattagcgtcggccttggcggcatcggacttcgtggaatcgtaggcttccttgatttggtcagcagtatgcgcagagccgtaaatcttgaggttgtcaagtgcgccggtatagtattcgccattcacccagttggccttgccgatctgcagcacgccgccgtctgcgccgagaatatcggtgagctgagcgaagctcgcgccatcagctggggctacggttgcggcctgctcaccgtcaatgtacagcgtggaagcggcctcgtcgatgaccaaatcgacgtgacgccactggctggcgagaccatccttgctcacattgccggtggtgtcgcgcttaccagcgttgttgtaacgctcaacgttcaccgaagtggtgcgatccatcacgccgaggtaatgctcttgctgataggtctgcgcattcgtattcggtgccgcaaataccgaccagccctgattggtgctggcggacttggaatcgtacgaaatcgtgaccgcatccaggcccttgagcacggcagaatcgtccgacttagtcacattcagccagaatccagaaccgagccgaactgcagcagtgccgtccttgctggtagccactgcggcagcaccgttgatggtcgccttggtgccggtggtgtcatcgacaatagtgccagtagcgcctgcagcgacgttgtcgaaatcaagactggcgagcagatcgctgtctgccgctgccttggcatttgatttcagggctgctgccagcgcccgctgcgcggccgatgaatcggtgggatccgattcaaccgcatttgctgctggcgccaacgccatcagcatcgggacagctgcaagagctgccaccgctttcttccacttacccatgtgtctcctctgattgtgggttttggtttttgcgctgagttatggatcgaagttattgatcaacggtgttcagcttcctgaacaggaaacaaacatcgattttgttatcaaattgttatcgtgcgataatcgaccactcctttatcggtcgggtttcgcacctttttcgcactaatggagctgctttgtttgtcagcgcgaactgtgttctcatacggccatgcgacgccttgcccctcgaacgacaccgttttgagggactggggcgatgcaaggccgctttttttagttgtaagtacttacaattttagtgttaacgttcactttttgtgcaagacgagggagctcccctcagtccgctgcgcggacagctccccgtccacttcctgctggtcggcggagctctgcaacacctgctgcgcattggcgagcgcggcggcgaaggcatcccaaccagactggtaatcagccttgttatagcccttcaccttatcgacaagcgcctgcaacttggactcgtcaagggaaccctcagtgggaacgtctggctcagcaggcttcagggcactcatggccgactccaactgttgggctgcggcatcgacatccttctgcagagctgcgtcatcgttcagaaccgtacggaccgcaccaagggccgcttccaacgactcccaagaagtcgcctcatagtcagatgccttcgatccctctgccttggcaaccaaatcgcttagcgccgtcttgtcagcgccgatcttccgcaactggtacgcgggcaagatggcttcccggctatcggctgaatcatcggggttgcttcccgcaagcgtgagggtcttgctggttcccgatgcgatgaacatgccagtgacgtattgtccggttccgccagcggctttttgactgttctgttcaagcttcaccatgccaccaagatcggcgatattcgtggttttgccgggattgtagttcttgccactcgtcgcgatgcggcaatcattggtccagagctgaatctcataacgctcacccggagtcagattattaagcgtcagcacaatgccggcacgctccccggcagagttcggaatggttcacgaagcatcaccattcgattcgttgaaccatgcgcttcccagcaagtccccgtattccttggtcagcgaagcgcaagccccagtaccgcaagaggcataaccattccacgccccaatttgattatcggaagcgtggcgatatccgtagtccgtgtaggttacggtatctccgttccccagcgtatatggaaaggagttagagaaagcctctcccgcgaacgtcacaccgttgaattcatgagatgcggtgtctccacccatattgaggatgggtgcccctagttggcaggcaggagggttcctctcagtccgctacgaggacagtccgtccgcaattgcggacggactgaggccgactttccgcccgtgggactgtcggccttcgttcacctacaaacgcctctggcgcttgcgctggagggtcagggcgatgccggcggcagcgagcgccacggccacaccactcagaccgagcacggccgcaccggtcttggatagaccgaccttgttacccgtcttatcgtccacagcaccagtgtcaacgctcgagccgtcgcccggcttagtcgaatcgctcgagccatcgcccgaatcggaaccgtcgaccttcaccaacgcggcctgcgccttgttcaacgcggcggttgcgtcgtcgacgtccttctgcgaagcgttctcgtcggcataaaccttctcggcggaggccaacgctgcggcgaacgccttccacgaggcggcggtgtagtcggactcgcgcagctgcttggcggacgcgagcgccttggacaggtcggtcttgtcgaccgtaaccgtgtcgtcagccaccttcactgtcacggaaacggtcttggaggccagctcctcggaagagctcatgtcaaacaccggcataccgtcggcggcccagtgcacacggcgcacgaacatgtcgcggccggtagcattcacggatccgagattcttcgtagcataggcgtggaacacgtagacctggttgccgtcctcgtcctcgctccacatgccgtgaccggtgccaagctgcatctcgccgttgaacggaccggacttctgaatcgggtagttgagcgccgtccagctggccgggtcggtcaggtcggagccggcggcatcagccacggccaaaccggtggtgtaggtcttgcctacgccggaaccggagaacatgaggtacagcttgccgtcgcgcagggtcacgttcggaccttcggctatggcggcgttccacgcgtactccggggtgacgatgcgcaccggggagctggtcacatgggccgggtccttcgggtccatcttggcaatgtaggtggcgccgagctgctgccaggcgtagtaggacctgccgtcggcatcctggaaataggtcatgtcgagcgacatgcccactccgccggacgcggtggccgcgagctgcttgttaccgttgagcagcgaggcgtcattgcggtagatcggtgtcggcacagtccagttatcggggtcggtcggatcgaggtcgtgaccgtcgacatcctgcttgagctgcatgtacaccgacttgccgttggaccatgtgttgccgtatccggccatgaacagaatcgtgagcctaccatcgatctcatgaatttctggagcccagaagctgtgcatgatggcattaccctcggagtccttgtcgccagccttgagcagcgacacctccttgttgttgtagccgttcgactgaatcagggcattcgggttgcccggctcgtcggcgagaccggaaatcgtgtcggccatgcggaacggcatgtggggcgaaccatgctgccaagtgacgtcaccttggatgtcgttggaagcgatcatcaggaacttggtttcggtggcttccttaccgtcgacctcatgcgtccactgccacttatacaccgatggatcggcgcggtcctcggcgaacggaatctggtattcggtctgcttgacggtgccggtgacagtgtaatcacccaccttcgtcagatctatgccctcagtgttccatgaggaaatcggcagggagccggtagaaccgtcggagtaagtgaggtccacgttcttcggcagttgcgcggtcacctcatcgattgaggtgcccttcttgacggtgatgtcagtgagattgctcgtgccggtgttctcagagcggccgtaacgggtgttgagcgccttcaccgtggcctcgtccaccgcgatggtggcaccggagcggaagttcgcgatgccctgcacaccgtcggcggcgagtacgccggacttggcgacggaaccgtacagtacgctaccgtgcttggatgtggagcccttgagcgaatcgaacgtggtgtacttggccacgccgttgtcatcggcccagccgacgacatactgcttggcggcggtgtcgtacacggcgtacggagcgttgacgccgttggtctcgccaagatcgatgatggaaccggagttctcctgttcgctataggtgagcaggtcttcggaagtggcgatgagcacgctggacttcgcggtggaatcaccggtggcggtgccacggttagtgcgcacggaaatcacaccataggtgccgtcggccatgcggaacaggctcggatccttgagactgcgatagtcattgccgtcaaggttctcgttgagcttctgcgccttcggcgaacgtgcgaagaagataccatagttctcgttgtacggggtgtacgaaccgtcagcgttctgcaacgcgaggtgcatgctgtaggcgacgtcgccgttgttggcctcattctcgccggtggcgttgcgatcgtaggcggcgatggtcgcggacttcgcggcgggcagcacctttacggtgaaggccttggtaatgggctcgatgccggcgagaccgttcttggagaactcgacggtgatggtaccggtcgtggcctcgtcgccatcgatggtgatcttgccatcctcgacggctacgtccttagtggacgtaaccgtggcggtagtgccattcacagccgccgggagggcgtctccggaacgcacgacggacgggatcacgtagccggccgcggcttccttgagctgttcagcggcagttttcgtggtcgggttgaccgtgaccgtgaattccttcgtagcggtctggccacggactgtgacggcggcggtcagcgtgacagtcttggctgcctcgcccttggcgggctggttgactgtgccgtcagtcgcgatgacgctgctatcggaggacgcccacgtcacgccgttcgcagtgggcagcgaaatgaacggatcgtcgaccgtcgtggggatgatgatgccgttcagcacggaaccggtgagttcactggcatgaattgaggcatcggcagtgctgatcgcggcgacctgatcggcggtgagcgcggcatcgtatacgcggaagttcgagaccgcgcccttgaacaggttgtcgggccacggcgaacggccgatggtgttgagcgactggtccttgacgctggacagtttggccggcacggtgccggatgccacctgcgtgccgtcgatgtacagtttcgcggcggtgccatcaatggtggcggtcaccgacaaccattggtcggccttggccacgcaggagctggactgcacgagcgtctccgtaccgcccgatttcaggccgacgagcgggttacgcgaactgccgcagttgagcgtggcgaagaaatactccgtatcggagctgtcgttaccgatgttccacaggaaatggaaagcattgagcatgctggaatccgctttgacctccaactgcaccgtggcggcgtccttgccggacagcagattcgagggcaacttgacccagtcgccggtgccggtcttggcaccgccggaaagggtgagggcatcatcggcccaaagcgagtcggcggagttctgtacttcggccgcgccaagcgtagcgttcggcgcactgttggccacggtcttgccgtcacttggcttcgtggtgaagtcgtaggcggcgatgagattatcggtcggaacggtatcggccgcgaccgccgtggtcgcaccgattcccatgccggcaagcgccatcggcactgccagcatcacaccgagcaggcgcttgcctatcgatggtttggttgtcattgcttctccttcttgcgcgcggtgatactgcttgccgcgcaacagatctagatattgagtggtgaagttcggtaatggctattggagctatggggccatagagcctatgcgtccgacagcgtcgtcggacgaacgtgcaatacgccccctctgatgggaccgcgccatgaagcgaacaatccagtaggctgcttgctgtacggctcggcccgtcagagggggcttggtctacgctgcaagcagctcaggcctggcgcttgcggaggatgtaggcggcgccggcggcggcgagcagtgtgaccgcggtgatacccgcaccgaacaccgaggcgccggtgttggacagagcgctgtccggcttggtggcgggcttttgggcaccgtcgtccttgccgtcggtcttgccggagtcgccggacttcttgaccagcttgtcggcggcggactggagctgcgacagcgccttgtccacttcctgctggtcggtggagttctgcaacacctgctgcgcattggcgagcgcggcggcgaaggcatcccaaccagactggtaatcagccttgttatagcccttcaccttatcgacaagcgcctgcaacttggacttgtccagcgtggagccgggctcggcggccttgatggtgaacgttgccgagacagtaccggagtacttgccaacgccggtcacggtcaccgtggcggtgccgggttcgacgttgttcgtataggccaccgtgtagtcggcgccttccttgagcgtcgcgccatcgagtacaacggtcacggccggctccttggcagcgccgtctgcggtgaactcgttgggttcgacggtgacggtcgccttggagaggtcgatgccgttcacaatgacggtagcctcgaccggcatacgggaatcgtcttgggcgatgcccttgacggtgaaggtgccggtcttggcgtaggaagatgcgtcaatggcatcccactcaactgcaacgtcagaaacggaaccgtccgcatgagtcagatgcgcggtctccggcagcgtcggagccacaccaaccgtcgtctcggcagacagcgcgtcaacggacttcacagccacagccggagcgtatgcctccagcaccttctggtactgggcgcgggtcacgggcagcacggttccgtggcgcggcttgccgccatcggagttggtcgggaagttcgcctcaggcatcttattgccgataacggtccactgaccgctggcgatatcctcagtcgccatcggcacatagtggtttggaccttgatgatagctcggctggtcggcgaacaggtagtactggtagccgttcacatcgccatcgttggccttgaatagcgatggaccttcgccggaagtgaaggttttaccgtaaccgttagcctggcctttaccgatgttcgtggcaacttcgctccatgcactatccttaagcgcatcggcgtagttcttcacgccggcgccaccaattgcggcagtcaaatctgtggacttctcctgacgcaaagacatcgtgttttcatctttgtagatgcggtagtaggtatcccctaccttttgcacggtcacatcgatggatccactgcctgcaccgcctcggcgatcaacgtcaatccacactaccgggtcggagaagttgacgaagtcatcggtggtgacgtacaccatgcggttgtaggtcagctgcttgcggctgttctcgtcggtgttgtcgtacaggttcgaggcccaatagaccacgtacttgccgatttcctcgtcgtagtaggcctcaggcgcccaagtgttgcctgcgtaatcagagctcaccttgacgtggctttgcctggaccagttgaccagatcgtcggacttccaaatctcaatgtacttggaaccgttagcctgtgcaccagcaaagccattcagcccgttgaggggggcacgaccgtcaatcttcagatcggtagcaagcatgtagaacttgtcaccatccttggacttcatgatgaacggatcgcgcaaacccttctcgccaaactcggaagtgaacagcggagtgccattgttcagcgtgttccagtcgagcgcatcgttgcccttggaagccgcgaggctgattttctcgccgcccacgccctcgccggtgaagaacgcccacacgtaggcctcgtccttctcttcggcggcaggcatcggctgaatggtgacggtgaaggtcttcgtttcggtggcggtaccgtacttggcagtggctttgagcgtcacagtggcggcatcgcttccggcggcagggcgcttaacagtgaccgttcgagatttgtcgttcacgccttcgcctagtgtggcgatatccttgtcaccggtcacttcccacgagatggtcgaaccattgttgcccttggtgggcacggagaagttgctacggatgtcgtcggagtcctcgatggtgacggcgtcaaggtcggccttggcttgctcggcatcggagaactgcttcggcacgaggaccgtgtaggcggcggttttggcgttgttgccgaacgtggcggtgagggttacctcggcatcagctgcggttgcggccggacgagtgactgtggccttgccggtagcgttgtcaacggcgatggctgcgttgcccgacttccacgcaatgctcacgccagcggcgctggtcggcagcgcgaagtcctcggtagcggatgcgggcacagcggccttgacagcggcctcggccttgtcgagcacctgagcgtcatacagcttggtcacgtctgcggcgctgatggcagtgtcgtatacggcgtaatcgtccacgtcgagcttggagttcgggtcagcgtaggaggacttgccaatgtaggcgacgaggtcgccgtaattggtcaggccaccggccggaatggtgtaggtggcgtctccaacctgcttgccgttgaggtagaagctcatggtgctgttggtgccgctgatgacggtggtgtacagagccaaatcgctggtggccttggtgccgatggtggcggcgttcgtcgatccagggccgacttcggtgccccacgggctgttattcgggtcggccgcagtggcattggtcattacggatttcgcgtagccactcgggttggccgggttgagcagccagtagccgttggccggataattgccggtcttggccgcgccgatgtacgcggcggcggtattgccgttgccgtaattgttcttgagccagatggagacggtaacgtccttcttaccggcgatggccgtggtcggcacgctaatggtttgcgagccggtcaggttgatctggccattggccaccgtggcgtcgccggatagggtggcatcgctgttggccgcgctgccctcgttggcgatggtcttggacgtcagtgcgttatcgaatgaatagtggatgatcggactggcgtcgattggcgatgcgctctcggcactggccgtcatcggcagcaccagaccagcgagcagtgttgccacgccgaccgtaagtccggttgcctttcgtatcagctttctcatgtttctcctcattgatagggttgattgtggttgcgcctccagttatgaggcacagttttgaaattgttcaagttatggtgatactaggtgcttcctctccgtccgtcagaagccgactgagaggaagcatttgaatccgctcaagcgcggcgcttgcgccagatagtgagggagatgccggcgacggcgagcgccaccacggcaccaccaaggctgagcacggctgcaccagtctcggacaggtcagcgccgggcttgtcgcccttgttgtcgcccttgtcaggatccttgccggtgttcttgtcaccgttatccttgccggaatcaggatcggtcgggtcttcagggtcaggagcgacggccttcttggtgagcacgaccctgtagaccttgacggtcgtgccatcctgcgtggtcacggtcaccgtcaccacgttgtttgccacggccacagtggccttggcgttggcatcgtttgccacagcctgcacatcggcatcggtcaccttgctcggatcgtcgacttcaagcgcggcaccctcagtagaggcagccgtgtcgaggtcgatatcggaaccgacaacgttcagcgacttcagcgtggcatcagaagacacctggtcctcggtcaccacgaccttcagcgtcacgtttttcttcgactggtcgagctcctcgctagtggtcatgtcgataatcggcgtgccatcggcacggaagtgcaccggaacaacaccggcatggcgagccgtgttgttggtgccactggtcatcgcgtgatacacgttgtacgtatcaccgtacgggtcagtgaagtaggagttgtggcccaagccaaactgaccggcgaaagtaccgttgtgcaaccacgggtagttggacttcgtccagctggccggatcggtcaagtcgtcaccgacatttgcgatgagcataccggtggcatactgcggagtgaccagctgcgcggagaacaccatgtacaccttgccgccggagacgaggacgttcgggccctcattcacgccgtccagctcccaaccccattcggggcgcatgagacgctgcggctcggtgatggcctgccacggcttgtccgagttgacctcggcaatggacacgttggccttggcacccttacgctcctgatcgccttggctccaagcaatgtacgacttgccgccagcctcgaagtaggtcatgtcgatggacagaccgtgcggggacagcacgccgccatccttggcctgcacgcgatgctcaagccagtcggcggtcttggtgggatcgccgccatccttgagctccatcacgtaagcagatggaccggcccagttgggagaattagtgatgttttcatcaccagccttaccggccgggaaggtagcgtagaagcagtatagcttgccgttgataacgtgcagctcaggtgcccagtggtaacccttgtgccccaaaccatcgttctcgccaaacaggtacacatcctgaccttcgaccttgtagccgccttcagttgcggtgccggccttctgatccttcagcccggcgagcgtatcggaggatcggatgaacagtgtcttcataccgccggtgtcggaggtgcccatggcgtagtacttaccgttgtagtacacgatgttcggatcggcgcggttgctcatcatcgggaactgctcggagtagttctgctggttgatggtgccgctgatttcgtaagtaccggcctcggtcaggtcgatcttgttcagatcgtcctgattccagttgacgcggaagtcgaaggtggagccatcggagtaagtggcggttgccgtggcacccttggagaggttgccgttgtcgagctctgcgccgccgttgatctgcgcgagcaggtcatccttggtggtcttgttggcctgcacggtgatgtctgtcgggacttccacaccagtgttgtgcacgcggccaagcctctcggtcaggctgtcagcaacatccttggtaagcgcgatggcgttgccgctaccagcaaccgcattatcgataccggtcaagtcagcttgcgcgcgctcgaagcctacgccgttcttgacttcagagaaggtcttaaagtccttggtcgtcacgtacttggcaacgccgttcaccttccacgagatacggtattcgcctgcggaagcgtcgtatccagctgcgatggaaccggcatcaaacagagtagcgtcagaggtgaccgtaaccatgtcgccacgctcgtcctcattcggcttgccggaccagtccgtcagattgctggaggtagagaaagcaacctggccgccatctacgcgattgccgttcacatcagtgaacactgccacataggcgtacttgccatccttcaactggaacaagtacgggtctacgagaccacgaacttcagtggattcagtgtttgcggttgcgttgatcttcgcctcggcaaaagccacaccgtagttggtgttgagcgcagtggtcgtagtgccgttgttcagcgccagatgcaaggcattgcccacgcgggagccaccgttgatggacctgtcgcgagtgtaggaggagagcttctgggcgctcttcggcataacgcgcacgccggtgaacttctttgtggtgctggtggtgccgagcgtaaccgtcgcagtaaggtcgacggtcttctcagcgtcgccgtctgcgccaacgactgtgccatcgtctttgacgaggctcgtgtcggaggacttccacgtcaccttcgcatcaggggccgcagcaattgcagtcggcagcgttgcgccggcagtgagctggtagtcgaccagcagtcgttcggcggctgcgtcggcggcggtgatggccgcagccacgttcaccgtgaatgtcttcgtgtattcgatgccgttgaccgtggacttggcggtgaacgtcacatcggtgtcttgggccggggctttgacgagtgtgccgtcgttgccgagcactgcggtgttggacgaagaccatgtgatcgtgttgccgagcgcatccttggcaggcagagtcacgctgccttcggtggagccgggcagggtcacgccatcccacaccatgccgtcggaaacgtaggcagccttccaaatcttgatgttatcaagaccgccgttgtagtacttgtcgccggcccatgtggacttgccgaagttcatcggcaggtcggtgccgagctcggagagcttcgtggtcacgttcttgttgatggcggcaaggttgccgtcgatgaacgtggcgatgaaggtcgggctcacggaaatgcggtacgtgtgccacacgttcgcggactgcgtagcggtcacgccctgctcgttaccgttggagtccttggtgatggcagtgtacacgctggttgggcgcagacgggagaagaagtacttctggttgtcggagcctatggtgaacgagaagaagttgtcgttcgcagccatgcgggacttcgagtcgaactgcacggtgaaggagtcggtgccattgagcagaccgttcggcagttcgaggtattgaccatcgttgcctcgcaactggatggcgttgccgcctgactgatggtctccgggtacgccgtattcgacattctcgcccttgacggtcaggtcgttattgttgccggagatgtccttccctttatcgttggcatcctcaaaatcgtaggatgcgacgagattagcgtccgtcagacctccgtcgttgtctgccgccatcgcggtgactggacctgaggccagtcccgcaatcatgaccggtagcgccgctatcgccgctaccgttttcttccacttgcccatatatttctcctcattgaatggtggggtggctgagttggttgttgagttgtgaagtgtgtttattgggaaaccacgtttgttgggctcccctcagtccatctgaggcggactgaggggagttgtgcagactaggcctgctcagtccttgcgcctgcgccagactcccagaccggcaccagctgcggtgagagcgaccatggctgcgccgagggctagcacggcggcaccagaggacggcagaccggagtccgcccccgtaccagcgttaccgttatcgccgcctgcaccatcgccggaaccgtcgcccgaaccgggcttaccgggctcggtcttggcactcacggtcaccacgaacgacgtggtgagctgatcgttggccttgagcgcgacggtgacggtcttggtgcccacagcggacatgtccacgtcgccgaccgtgtagtcggcagcatcgagcgtcttcaccgtgccgtcggacatcgtcgcctcgatcacaagaccatcggcggagaactgctcgcccaccgtgtacttggtctttgtcggctcgctcttgacgcggatgccggtgatggacggctcaaccggcgtatcgggctcgcctacggtcaccgtaatggtcaccgtgcggttggccggagcgacctcctgatccttggtcagcgacatgtcgagcatgccgttggcgcgcacgttcacggccttgccccacgtattgcggtcctgatcgaacaggccacccgccgcggaaccggagtgaatttccgggtaggggcgtgcgtggtaggccatgacgatgttgccggcctcatcatgtgcaagcgagatgtggccggggccggcctgcttgcgctcgtacgaggcctcatccgcaccgtaggtaccggtgtaggtgtcgttggtgtcgaacgacgggaagtcggccgtggtccagctcgacagatcctgcaggtcggcattcttggcggcacgcatcacgttggtgttgtaatacttatccaccgtggcacccgcataggcaatgtagacgtagtcgccatgctcgaacatgaacggtgcctctacgattgcctgatcagaaccttcagagttgtctccgggggtaggcgcatacttgccgtactcgaactgctggctggcctgatagatgtgctcaaggctgccatccaccagcggagtgacgccatcgcccatctttgccttggcaaggtacaggcctgcactcttcgggaagagccagtagccttgggccttgccgttctcctcgcgctcgaagtacgtcacgtcgaatgcggcgccttccagcacggtcggctcgccccagttttcggcctcgaggaatccgccatccttgatggactgctcgtcaccggtgtacgggatgaggatggtgttgttgcaccagccaccgttcgtggacgaggcacccttgtggaagccggccacaatccaccacttgccgttgatcttgtggaactcctgggcccaaatgaacgcgctccaaccgtagaacgagtcggggtactggtcttcgtggcccggagtgccgttctccggcttgatgatgatgtgttcctcagcatccttcagaccgttgatggtcttggcgcgcttgagaccgatggaacggtagccgtccttctggttgttggtcgaatcagtggacttcacctcataggtggaaccggtgaggtagtagtagccatcgtcttcgttgtagaagatgtccggatcggcgcgagcgtcgttgtacatggcctcggtggtctgctgaacagtgcccttgacctcatacgtgccggcctttgaggtgtccacggcggccagatcatcggcgttccagtcgacgttgaaggtcttcgtggagccgtcgttgtaggtcattgtggcctgcgttccggaaaccgctgcggtgacgtcctcggcggaagcgccgttctccacggttgcgccgcccagagccttgacgccggtgttttgcagatcgacatagttcttgtagaacgcatcgaattcagaggagctcacagcgaatgcgcgggtctggccttcgccggcccatgcgggcagaccttcggtcacgtcgcccacacccatcgcaaccgcgtcggccttgagcgtctcgccgaccgttgctttggcagtcaggtcggagagcgtggccatacggccttcgccgctcaggccatcggtccagaagactttgtagcccttggaggcggcatcatagacgatgcgcgggttggtgacgatggagttgtcggtcacggtgatggcgcgctcgttggtgaacgtggcaccgtcgcccttgccatcccacacgtaaatcgcaccggtggcgttgttctgcgaggaaaccacaccaagggtaccgtcctccgcacggaagaaagcgggtgagcccatctgcgcattcggcttggcagactgcgagccgtcccacttgaccgacagaatcgactgcgaacggttcagggtctcccatttgctgccatcggcggccttggcggccacgtacagcgagtcggcgcgacgatcgtcgttgtaggcgagcgggtcgtacttggcaccgttctggtcggagcgatcgacatccttgacgtaggaagcgatttcgccgccgttgttgaggatttcggattcggcggtgatggccttatccacgccgtcgatggtggcggtgagcttgaccttcacggccttctcgccggacttcggctgcgtgaccttgccgtctgcggctacgagcttcgcaccgtcgccggtcgcggaccaagtaaccgtcttgcccagcacagtgctcggcaggtcgccggtgatttgcgccgggatggcgagcgcggcggcgtagtcggtcttcgcgctttccacgccaagctcgtcgtcgctcagggccttgccccagatcttgaagttgtcgagcagaccggagaagtactcgccgttgctccagttggccttgccgatctgcagcacgccgccatcagcaccgaggatgtcggcgagcttctggccgttgttgttcacggctaccagcttggagtcgatgtacagcttggcggttgcgccggaaatcacgatatcgacgtgcttccagtcggcgttcgtcttggtgtatgagacgttgccggaggaatcgcgcttgccgtcgttgttgttgtagcgttcgacggtaataccggtggtcttgtcgagcacgccgacgtagtgttccttgccgtactcctgcttggtggcgttggaggcggcgaagaaggtccagccagtgttgccggaggcatcgggcttgacgtcgtagctgatggtcacgtcgttcttgcccttgagcagagcgtcgccgttcttggcggtgacgttgagccagaagttcttgctgagcttcgcggccttgccgtccttgccgtcggcgagcgtggcggtgccctgcgtggtgcccgtcgcattgccgccgtcgaaggtctcgccggcgttctcgaaggtgaagtcggcgagcagatccgggtcggtcggctcggtttcgccggtcacggtcaccttggcggtcacggtgatggcggtggagctgtatagcgtgcggttcttgttggcggtttcgttgtccacaaagccaccggtctgcttccagttgttgttcgcgttcgcaccggtgttgatgaggtcgtcctcgtcggtcttcgactcgccggcggcgttcgtccacttccaatggttctcgttggcaccgatggtgtcgaccgtgccggtgacggtgtattcgccgggcttggaggtgtcgacgttggaaacgtcccacgtcacgtcgcgcttggcagtgccgtaaccgttggcaagagtgacctgctgcgtcttcggcagcttggcagtgatgtccgtatcggcagcacccttatccaccgtcacatcctcggccttcaggtcggcgttgtcggaagccttggcgtcagccgcgcggatcgcgtcgtactgggccttggtgagcgagaccacgccaccgtgcttggtgttggcggtgaggaagtaatcgtcggccttcaggacgctccacggattctcggaatcgaggttgtcggcttcgagtaggttgtagccgtagcgggcaccggaggcgacaaatccatagttgtcgacgaacatgtaccacttgttttcgccgttgaccttgaaaccgttggcaccttcctgcgcgctgccgagcgtgtgtccgatgttggtctggcgcaacacccagcccttggccgggtcggtcgcgtactggccctggtcgttggcacgccaccaatcggcacgatcggtgtattccatgaagatcacgccggaaccggtggtgcggtatgtgcgggaaccgttctgcagcatcgtggtgtcgatggtgttgccacggttgtacttgctgttaggcacgaagacgccgccaaacatgtaagtctcgttggtgaagtccttggtggccgcccacaacacatgcttgcaggcttcggcacggtcgccgccatcatacttggcctgtacagaccagtacagcacaaatgcaccgccctgctggttctcaggattgcccttgtcggaaccgttgagttcaccgtcgtcgttgagatcgtagaagtccggcacccacgtagcctcgggagcccacgccatgccgatgccggatacggtcttgccggtcacggaatcggtgagcgtctggctcttggtcggattggcggtgtacgtgtctgcggtggcggtctcaagctcgttcatgtcgctgaagtgaatgagatccttggacgaccacacatgcagcttggtgctgtaatcagtggtccatgcggcccactcggcgttgtccgcgccgaacacacgcaaatcggtggccagcacgtagtaggtcttcgactcggggttgtaggcgatgaacggatcgcgcacgccggtggtggattcgttgctcaccagaatcggctcgccgccgttgagcgtgtcccactgggtggcgtcatcaccgcgtgagatgtcgaggtagatcttctcggcgtagcccttgttgttttcgatgaagtggaccatcacgtagccgtaggcgtcatcggccttgacctcggtgacggtgaccttgagctcggcggtcttggcggcgtcagcttcggaagccgctgtaatggtggcggtgccggccttcacgccggtgaccttgccgttggcatccacagtagccacagcaggattgttggattcccacgtcactgtgggatcggcaccttcaggggtgacggttgcggacagggatgcagagttgccttccttgagactcagcttgccgtccttcacattggaaccggaaatctcgattgcagtaggcgatgcgatgccgagatcggctgcggaaagcgcggagccataaatcgtgagattgtcgagcaaaccggtgaagtattcaccgttgccccagttgcctttgccgatttgcagcacaccacctgagccgccaagaatactcttaagatcctcgccgttcacgttgctcgccacgaacttcttatcgacatagagcttcgcggtcttgccggagatgacgagatcgacatgcttccaagcatccttcgtaccggtgttcttgtcgatggtggcgatgtcggatgcgcggccgttgagatagcgttccacgcgggtcttgtcggtgcggtcgagcacaccgacgtaggtgggggcgctgccgttcaccgcaccggcggtcggcgcggcaaacacagtccactggccaccggtcgcagccgccttgctgtcgtagctgatcgtcacatcatcaagaccgttgagcagtgcactgccatcggacttggtcacgttcagccagaaaccgctgccgagctgggcggccttgccgttgtcgtcatcttttccgttgacgagatccaccgtgccttgcacggtggccttagcgttaccctgagcactggcgaatgcaccatcgtccgggtcgctattgaaatcgaagccggcaagcgggtctacagccgcagcagcctgagcatcgctcgtctgaacggattgctgcacctgaggtgtcgtatcgtcagccaacgcggtgaccggcgtaaccagtcccacgctcagcgttgataccgcagccaagcaggccgccaatcgagtaactctcctcaccgagtttccttcctcgcatccttgctagattgttatcaaattgttatcgctatggcgcttggccgctcctttatcggccacttttgcgtctccttgtacgaatcagcacttcctcgtttgccgattcgcattacatttgactgcacttgcccaccaatccgcccctacgaacaacgccgttttccggggacaacaccgatgcgctatagcacgcccaaatgcaagcacttataagtttagtgttagcgttcactggtacggtacacaggctctacagcacatacatttagcatgaccacaccaatacaataaaaaatgacgcatgtgctgttatacattaaaacgcacagaaaatcacatatatactgtgcgattttctgtgcgttgcagtgagcagctactcagttatgcgcggcgcttgcgccagatggacaacgcaatgccggcagcggcgagcagcaccatggcaccgctcacgccatatacggcggcaccggtggccggcaacttgccgtcagacttggtgtcatcggtcttgtcgcctgcgttatcgcccttgttgccaccatcgccggtatccggcttggtgggcgtttccgccttctgcaatgctgcgatggcggcgctcagatcagcggcggccttgtcaaccacagcctggtcggaggaagcgagcgcagccttggcggcctgcagtgccttggcgagcgcagcccaggaatcagccgtgtaatcggattccttgagcgcttcggcagcggcgatctgcttgttgagctcaaccaaatcgaccttgccctgttcaatgccgtcaaccgtagtatcggatggattgaccaaaccatcggtgtagccgtcgtaagcaaccgcaacagtgccagagacgctggccgggagggtcacagtggccttgccttcggcgtcgagcttcacggtcttggaccagtcgccagcagagaacttcaccgaaccggcgagcgtgcccttatcggcggcggtcaccgtggcggtgagctcgcgggtgccggcattgtactcggccttggtggtggagtcaacagcctcgatgtgcgtcgggttggcagcggtccaggacttcgtcaccttgagcacagactcaggcacgttcacgaacgcaccgtgacgcaccttgtccggcagaccgccgttagcaccctgagtgatgtagccctgagcgcccggctcggctttgaccggcttcttttcgttgttgaagtccgggtaacgcttggtcatcgggttgtcccacgtggtcttggaaagctcggcacccgtggtcataaatgcacggtaggcgaagttgtcggacagcagaatgtagccgtcgtcgtccttcgtgttgagttcgtcatccttgttgagcttgatggtctctggtccttcgaacggcagcaacgcctgctcgagcagctgccaaccggtgttcgggtcctgatccggagatgcctcggtggtcggtgcagtcagcaccttggaacgctcaaggaagatgctcttaccagtggtgatgtaaccgccagcggcaccgccctgctcattcttggtgagtcggtagtagtaaccaccgatcttacgcacggtggaatcaatgcgcgcgtaaccggtatcctgccacatctgcggttcagtgaagttcacgaagtcgcgggtgatggcgtaacgcacctgagcataggagctattgccggttttgtcgttcttgaccggagtagtacgggtgtcatcagtgaacatgcgggaagagaagaacaccacgtaagcgttcaggtcatcatcccagtaagcttccggtgcccaggtcataccggcgttcggcgtgttgatggtgatgccgccgttgccgtcgccgttggtacgggtccagttcatcatatcggtggactcgtagacctcaactttccgagagccgttaacctggttttgactccagcccattgacgagaccttgagatcagtggcaatcaggtagtacttgtcgccttcgtgggaacgcagcacgaacatgtcacgcaagccacccgtgtcggcatcattggtaagtaccgcctggccattgttgcgagtcttaaacgtgaagaaatcgttcttctcagtggaagccacccaggccttttctccaccgttgctgtcgctctcaaaagtgacggccgcatagccggtgtcaggcgcgatgcgggtcttctccttgacagtgacctcgatggtcttggtgaccttctcaccgccgttgtaggaagcggtggcggtcagcgtaaccggcttggaatcaccgtcgccgtaggccggacgattgatgatgccagcaccacgatacgggtcatcggcaccagtggtcttgttttcgtacttctcgttagtggacgtaatgagcttctcgtccgaggacttccacgtaatcgccgagccgttcttggtgcccttggcgactagcggcagattctcggccgccgggactttcagcgcagcaatcgcggcatcgaggtcggctgcggcggcgttcttggcgttcatcggctcaacggtgacgggcagttcggccttgacgccacccagctcagtggtggcggtgatggtggcagtaccagccttgacgccagttacggtaccgtctgcggcgaccttggccacggactcatcggaggagaaccaggtgacgttcttgctcacggcgtcgtccggagtgacggtggcggtgagcttggtggagtccttctcaatcagggtgagcttgttgttcaccacaccggtgccggaaatcgcaacggcggtcggcatggtcaggtcagcgcccctgtagaccttgatgtcatccattgcaccattccagtactcatcgacggagtagaacgacttgccgatgtaggtggtggtcgcgccgagatcgctcatcttgatgccggtgttggccttgaaaatgatcagggcattgttgcggaacacggcaaggttggtgccgtccacgacaatcttgtaatcggcccagctgttgtcgttgccggaaacggtgaccttggatccctgttcgttaccccagttgttgttggagataacgcccttgatggcggtcttgctgttgtagaacatcaggtacttgttggcgttggcctgatcggtggtgttggcgtcgttcgagccgtccttgccgacgatgaacgagaagaacttgccgctgttgtcgtgacgagtcttggacgcgaactccagagtgaaggagtcgcccgcatccttgaacagctggtcatcgatctgggcgtactggccatcgccgcgcagtgagagcgcctcgttgttgctgcggtcaccgtactgttcgatcttggcgccgtccttcagcgtcaggttgtacttgccggtcgaatcggcaatcgcgctgttcgtggtgccgtttttgcccgtgaagtcccagctggcgagcagcgtcggttcagcagccttagtagtctgcactgtcgcggtatcggttgtctgtggttgggaatcttccgattccatggcatacgtcgtcggaactactgccaccatcgttgatattgcaatcaacgatgctgccatcttcttccaatgcttcaccgcatctctccttgtcctttgcctcgacccacttgtcgggcgtctcgttcgcctctacgtgaacgcaaacattatttgcgatgataccattacggcactgagactcagtgtgccagattccttatgcatataagcacttacgggggcagccgcccagcccgaacaccccccgtatgtccaaaagcccccttccaagccaatcactaatacccctcaatcggcaccccgctccgccagccgccccaaactgttatcaatttgttatctttaccgcgcttgcgtggacagagagcgctcagacctcgaagatcgccgcatattcgcgagagaacccgcctagtcaatgagatatggcttgaagacgcgctcggtgacggggatatggagcatcagcatggtgccgtaaccaaggatcaccagcaggaacagtccaccgggcatgtagaaccagctggccaccagcagcgtcacgaacacggcatccacgatgactagggccacggtcatcgcgatgtgggagatgccgaagatgaaggcgttcttcaaggtgccggccacggtgttctcgaagcgtgcctgaagcgcgaacacccattcgaaaccgataagccagaggatggtcagcgcgaatttgatgatgagcagcggcgtgatctgcaggacgatccatgaccagaccagtgcaatcagcgccaccaagaacggcatccacagcagtgtggctttgatgaagttggctttgaatgacttgaagtagttggcggttacgcctttgccctcgccctcgatggagcggcggcaagcatcatgaccggcggtcagggctgcaccgatggtgatgagcggaatagaggtgaccagcatcagaatgttgatccacacgccgtcaacaagattgctccacgcgcgcatgaatttcgagtccggtgccagccagttcatcaactactccttgtacagcttttggctcccctcagggaggggagccaaattgtcgggctcaacccttgaccgcgcccgccctgcaattacggacccgcctacggcgaggcccatcattggcttcgccgctgtcgcggctcagcctggagcctgctggaagcccactgggcttccagccatgggctgacgacgcgagtcgtcagcccttgacggctccagccatgacaccagagactatatacttctggcataccaagtagaagacgatgatggggatgatggccagcaccaggcaggccatcatggcgcccatatccacggaaccgtagccgcccttgaggtattgcacggcgaccgagacggtcttgtacttgccgaggtcgagcgtcaggtacggcagcaggtagtcgttccagatccacatggcttcgaggatggccaccgagacgatcgacggcttcataatcggcaccacgatctggaagaagatgcgcggcactgacgcgccgtcgatcatggcggactcctcaagctcctgcgggatgcccttgatcacgccagtgaagatgaacacggccagaccggcaccgaaaccgaggtacacgatgcacaggccccacggggtattgagcttcagcatgtcggcgatcttggagagggtgaacatcaccatctggaacggcacgatcatattgaacaggaacagggtgtagagcagcttcgcggcccagttgttcacgcgcacgatccaccatgcgcacatcgaggtgcacaccagaatcagcgccaccgagccgacggtgataagcaacgtccagccgaaggaggcgaagaactgcgtggtctcgatgccgcgcacatagttctcaagtcccacgaacgccttgccggcaggcagggagaacgcgttcttggagatgtacgccttctgcttgaaggagttgatcagcaccaggacgatcgggaaaatccagaacagggagacaacggcaaacagcacggtccataatgcgccatgcttcacaggcttgttctcgttcatcaggctgccacctccttgctcgtggtgagcttgttctgaatcagggcgatgaccgcgaccaggatgaagaacagcacggccttcgcctggccgacgccttcccagcccatacggccgtagaaggtgcgggtgatgttcagcgccagaccttcagacatgttgctcggcgcaccgttggtcaatgcgaggttctgatcgtagagcttgaaaccgttggtcacggtcaggaaggagcacacggtgatggacggcatcatcagcgggatgatgatgcggaacatggtctgccgtccgttggcgccgtccacggccgcggcctccagcacatcggtgggcagggcttgcaggccggcgatgtagatgatcatcatgtagccgatctgctgccagcacaccaggatgaccaagccccagaacccgtaggacgccttataggtcagggcgcggccccagtgggctagtacgccgttcaggagcagcagccagatgtagcccaggatgatgccgccgataaggttcggcatgaagaataccgagcggaacagcgtggagcccttgatcgccttggtcagcatgtaggcgatggcgaaggcgatcacgttgatcacgatggtggtcacgatggtgaacgcggtggagaagccgagcgcgtgcaggaattccttgtctttcaacgctttgccatagttcttaagccccacccattcaccgtcggtaacggtggtgaattcgcagaagcttaagtagacgcccatgatgaagggcaccaggaacccgatgatgaatgcggcgaatgtggggagcgcgaacagcgcccaccatctgcgtatcgccttgccagccatgctgatcatgacttttcctcctccttgagtccgctgcgttgtgacactgcatcgtgcgccggctgcggagttcaactcaatgcgagcttgccgatcgagaaccgcatgcacggcctgttctcgttcaagcctatgttcatagtaaacgtcgaatcattatatgtcaaacgttgtcattttaggcgtttcaagttcgagcacactccggctccagcaatcttctttcacctaagataatggctatataaagccaatctaacgccgacatagacactttgcaaacgtttgtaatacaatcgttgtcatcgccgcagatcaatcaatcagcatgtacactggagtcagttgtgcatgtgtattgcgattttccattcaacgcaagggggctgcaatggctacgagcattcaggatgtcgcccgcgaggccggcgtctccatctccaccgtctcacgttccttcaccaggccggatctggtgtcggccaagacccgcgagcgcgtgctcgccatcgccgacaaactcaatttctcactctcccgctcggctgcggccctgaaatccggccgctccctgcgcatcgcagtactgatgagcggccatatccgcctgtggttcaccgcctcggtcatcgaggggctcaacgaggtgctgcacacgcagggctacgatatttcggtattccagatttccagcatcgaggagcgcaaggaattcttcgagatgttgccggtacgccgtaacgccgatgccgtgattgtggcgtctttcgatatcgacaacaacgaaatcgcgcaactggcttcggtcggcgtgccgatcgtcggcatcaattcagtcgaacccggagcccgcggctttaccgccgccgtcaatatcgacgatgtgcagggctccacgctggccgcccgccatcttatcaatctcggacatcgccgcatcacctacatcagcaccaatcgcgaggtgtcgctgagcttctccgtgcaaagccgattcgactcattcaccgcctgctgccgcagggaaggcatcgagccgcaggttatcgtctgcaaggtcgatgacgatggacgttatgaaatcagcgacgtggtcaaccaactcataagccaagacgagatgcccaccgccatcgcatgccaggaggatggcattgctttgccgcttatgttccagctggagcgcaatggattctccgtgcccggcgacgtctcgttgatcggctacgacgatagtttctacaccggcgatatcggcctgaccaccatccgccaggatccggtggaaatggcccgcgtggcagcccgcatgacgctcgatctcattgacgaaaagccgattgagcaaccctacatcgtgttcccggcccagctgaaggtccgctcctccacctcccgcgttaagtaggctcacacaacaaagcccaccatagaaaaagtgtgaggcaaccgcacagtaacgctcaatcgcacattgtggagaatggcgaaaaatcgccgattcatggccccacagtgtgcgattgagcgggtgcgtgcctcacacttttttgcggcggacgattttgtgcgagactcagcaatacaaagcggcgccccccggagaaggaaatggcaggggcgccgcggattgttacttatcggctatgggactctatgagactcagtgcgaagcctcgtattcggaagcccaaccgtccacgaaggcggtcttgacggcatcccacttgccggtgccctgcgcgtactcgagcagtgcctggccgaccttgttcttccactcttcggacggcatcatggtgaagttccaagaaacctgggtcgtgccggacttctggtcttccacggcggcttcggtcagcgggttgtcaaacttgacgtcatcgaaggtcttgaacggggtggtgaagcccatgtcctgagagatggccttcttgccggtgtcggaggtgatcacccaggagaggaagtcctcggtggccttcttgtcggcgtcggaggccttgtcgttgatgcaccagtagttctcggaaccagtggccaagccctgcttctcttcacccttgacaccggtgtagattggcatcatgcccacggattcggccttcatgccggccttctgcaggtcggtccaagcccaggtgccgttctggtagaaggcggcctcgccgagcgcgaactcggagttcgcatcatcgccggtcttggcgctcagctgggtggggtcggtggtggagtcggtgatgtacaggtcgaagatcttcttgtagttcggcagataagtgcccttgatggtggccggctgctcggtgacgttgtcgtccttgaactcatagtagagcggcaggttggccagatgggtcttgaatcgccagtcggagctggagtcgaagccggcggaggtgaacgcgcccttgatgccgagctcgtccttgcgggcctgcatgtcgtcggccacggccttcagggtgtcgaagttgtcgatttcgtccatggacgtggctttggcaccatccagcgcgaagtacttgttgaggatgtccttgttgtagatcaggccgtaggtttccatcacgtacggcacaccgaccaccttgtcgccgtctttcagggccacgtcctggttggtgagttccttatacacatccgtgttggacatgtcggcggtgtacttcttccagttctggtagccgaccgggccgttcacctggaacaaggtcggggcttcggttttggcgatttcggacttcagggtctgctcgtaggtgccggaggccgcggtctggaccttgacatcaacgcccttctccttggtgtactccttggccagagcggcccactgatcagccgcttccggcttgaagttcaggtagtagaccttgcccttggcgtcatcgccggaggtcgagcttccgcaggccgccaaagtgccgagggacatcgcagcgatagccgccatcgcgactgctgacttgactgtacgattcatcatcgaacctttctctttcatcgtcgacccggccgtccccggtcaggacaggtacgctaacacgcacctttatgactatcgacatgcactattgtgcaacggtttgcttctttttgcaaacgatagcaatatcggcgcgtcataaatcatcattttcaggccattgtcaacaaatatcccattaattcggtcatttttgcctcattatcgcaatgcaagcgttcgcaattatgagagcgctaacatatctttcatggcaatcgattgccacttatacccatcaaaaaaaaacaacacggcgacgctatcgtttgcaaatcatttatcgacataccgcaattcccaccacaaacaataaaggcccgcccgcagcagcgggcaggccagcgtaatcacagcgcaaccggggctaggcgttccaccgttcgatgacgttatctcccttatagacgctgagcaccgagtagtgcgccgtatccaaacgcagcaaccgcgcgaaatgcgggtccacgcccagccattgcgaggtgaggatgcgcaggatgtgcgcatgagccaccaacagcacattatggccgtctttcagcagcggcgtaatctcgtcgatggcgctcttggcgcgtaccgctgcttcttccagcgtctcgccaggcccggcatggaccggcacctgctcgcccgaaggtaaggtctcgacccagtcgccctccagcgtgggcgtcagcgagcgcggcccgtcacgccacacatcccattcaaaaccgctggcctcactcacctgctggcgcgtacgcccctcggctcggccgtaatcccattcagcgatgccgtccaacacaccgtggtccgcaaaaccagccaattcagcggtttggcacgcccgcttcagcggactggaaaacacacagctctggctgaatccttcggggaaggcctcgcgcaggcgccttccggcatccgctgcctgctgctcgccgaccgcggtcaacgggatgtccgtgcgcccggtatgctgcccggattcgctccacacggtctggccgtggcgcagcaacaccaaaaatccattgccgccacgagagttctcgacggcaacggtgccgttcacgttctgttcgctcatgcctccactctagtctgcgctcgttcatgactccaccattaacgcccatcttttgcgctgagatgattgagatgctattagactgagagtcatgagcgacgaaacgaacaccgacttcccctccagcgccgaccgcgcggtcgacagcctgcaccgcatcgacgagaaggtcaacaggctgcgcgaggaccggctcaacgaccctgattctctgggcgacaagctcatcaagtcggcagtcccagcgctggcaggcttggttgccggcaaagcattccagatgatatgggacaagggcacaagcaaacgcaatctgcgcaagggactggcggcagacgcgccgcaaagtctggcaatgagtctggcattcgccgccgtttcggccgcactcggcgcagtggtttcgcagctgtcggatcggggctccaaggcgttcgtcgaccaccgccatcgcaagcccagccgctaatcccccggttggatgatggtttctgttggctgactgatgactcatcgctggaatttcgtcaaggaaccatcagtcaatcgacaggaaccatcagtccagcacagttccgccacacaatatcggcatttcactgtgaggtaatccaccgtgacgtccggcgtctgccgtgcgacaataaagccatggttaccaacgcaacaatcgaggctcttctgggccgccgctccatccgtaagttcaaggacgaggccatcgacgacgatacccgcgccacgctcgaaaccgtcgcccaacatgccgcgtccagccagttccttaacgactggtccgccatccgtatcaccgacccggccaccaaagccaagctcgccgaattcggccatcagccgtatatcgccaccgcgccgttgctgtacgtgttcgtcatcgacgagcaccgcaacgcacgcatcgccgaacgcaagggtatcgatcccgcttccgacgaattccatctcaagtacagctatcgcttcacccaagctcagaacgacgcagtgctggccctgcacgccatggagaccgccgcctattcgctgggactgggctgcgtgattctcggctctctgctcaacaacatccccggccttatcgacgtgctgaatctgccggaatacacgtatccggtgctgggtctggccatcggcaagcccgatcagaacccgaccgtcaagccgcgcatgccgcgcacgatgcagttcttcgagaacacctacccggctgacgccgatggcgtactcgaccagctgcccgccttcgacgaggaagttcaccggtactacgatctgcgccaagccgaccgtccggtggacgctttcagcgatcaggtcgccacgatcagtcggcaggatgtcagccatcagacactgctcgacaaggccgccgctcagggcttccgtctggatcagtgagaccagaaccaacgagatagcctcggataggctcgtcactgagtcgtctcggtctcagcactgcgacgactcagttccaacacctcaacatttcatcaccggataccggcaaaattgcacaaccatcccgccggtgtcgcaccatcaacaaacgttcacatatcagtcccattatgcggacaaccaacggccagttttgcaagaaaacccgccaaaccagcagtattcgcaccagtggtgggaatagactgcatgtggccgcaatgattacgaaccggaaaagagggactggatgcggacggtttggcaagtctttctacgcgattgcagacgtatcttacgcaatcccgttgccgttgtggtgacgctcggcgtagcaatgctgccctcgctgtacgcatggttcaacattctcgccaactgggatccctattcagccaccggcaatctgcaagtggccgtagccaatgaagaccaaggcaccaccaacgatctggtcggccatctcgatgcgggccggcaggtcgtcaagaaactcaagcagaacgacgaactcggctggcgcttcgtagacaatgaggaacaggccgtccacggcgtggagaccggcggatactatgcagccatcgtgctgcccaaggatttcagcaccagcctggtcgaatcggtgaccggaacctccaaacagccaaaaatcaagtattacgtcaacgagaagaagaacgcgatcgcgccgaaaatcaccgacaccggtgccaccaccatcgacgagcagatcaactccgccttcgtcaccacggtagccaccaccgttgcctcggccgtttccgaagcgggaggcgatctcgaccaagccaccggcaaagtccagcacgatacgatcaatgatctcaatacggtgatgtccacgctgaacaccgttcaggattcactcaccgacttacaggacacgctggcccaatcagacacgattctcgccgacgccaaacagaccaccgcctcactcaagcagaccgtcgcggccgcgcagaaggcctcccgccagtccggcacactgttgacggaaacacaggccgggtcacaagccttctccaccacactggtcggcgcactcgacaccagttcagcacaactctccggactggccgttcacgtcaacaacgccgccggcagcatcaccggctccttcaacagcgcgcagaactccgtcgacaccatcaccaacacactttcggccccactgaatgccacccaaacgtcaatcagcgatctgaaagacgcgctgaccaaagccggcatcggcaaagacaccaccgacccagtcggccagaacatctggaaacaaatcgatgcgctcgactcattgatcagcaaacagcagacacagctcaacaccttccataccgacaccacacagttcatcaactccggtaaagacgccaccacgaatctttccggagccatgaccaacaccaccaccggcggcatcgcggcgctgaataccgcgcgcggctcgctgaccggcaccgtaatgccgtcgctcacctcatcattgaacagtttcgccgccctgaatggcacactggatggcacgttgacttcgttatccggcaccttggatcaggccgacggactgttcgaccagcttgtcgataccctgaaccaaacaaaaaccaccatcagcagcacgcaggattcgctgcgccaggtggccagcgatgtcgccaccgtacgcaccgatatcgccacgctcgatagttccgccgcttaccagaaaatccgggatacgctgcatctggatgacaagggattcggcgacttcatgggcaatcccgtcaccctgaccacgaaagtcgtgtatgccaccgacaattacgggtccgcagtcaccccgttctacacgaatctggcactgtgggtaggcggtttcgtgctaatcgccatctacaagcttgaggtcgaccgcgagggcattcgccgtatcaccgctacgcaagcatatcttggccgctggctgctgctggtcaccatcggattcctgcaagccgtcatcgccaccatcggcgatctggtgcttggcatccaatgcgagcatccgctgctgttcatcttggccgggatcttctgttcgttcgtatacatcaacattatttacgcactggccgtggcgttccgccatatcggcaaagccatcgccgtaattctggtcattgtgcagatacccggcgcctccggcctgtatccgattgaaatgatgccgaacttcttccgcgaactgcacccgtggctgccctttacctacggcatcaacgcgatgcgcggcccgattgccggcctgtacgcgaaccattactggctcgacatgctgcacctgttctggtatctgccggcggcactcttcgtgggacttgtcatacgccggtatgcgatgaacctgaacgcgctgttcgaccgtcgtttgggagataccgacctgatgatcaccgagcacaacagcatggtgaacgaacaggtgagcttgaactccgtattccgcacggtgtccgacagcaaggaactgcgcgatatcatcgcccatcgcgcgcaccggttcttcgcacggtatccaaagatgatcgttgccggtctggcattgctgaccgtactcccgttcgtattcctggtgctgctgttcgtcacccaagagaaaatcgccatgctgacctcttggattctgtcgattattcttatcgacgcctatctcattgtggttgaatacgcacgcgaagcctacgccatgcagcttggcgtcagcgccatgagtgccgacgagttccgcaatgtgatgctcaacggatatgtgtggcggcgtttccacggccacggacgtcacgaagcggcgatggacagcaatccgaatatcggcgaaaccactgaacgactcacaccgttcagtgatcaggccaccgagccgactgcgcacaccgcacagtccggtcagtccgggcagcctgggcagggaggcgcacgatgaagcttatctggaaaatattcgtacgtgacgtgcgccaagccacccgcaatgtgatcgccgtaatcgtggctatgggattggcgattgtgccggcactgtacgcctggtacaacatcgccgccagctgggacccgtacggcaacaccaaggccttgaaggtcgctgtggcgaacgtggataagggctataagtccgatctgatgccgatcaccatcaacgtcggcgaaaccgtgaccaatacgctcagggccaatcatgaccttgactggcagtttgtggatcgtgctaaggccatcgatggcgtgaactcaggcgaatactatgccgcgctgattattccaaagagcttcagctccgatatgatgacgctgttttcaccgaagatcaagcacgccaagctcgaatactatctcaatgagaaaatcaatccgatcgctccgcatatcaccgaccagggtgctaccaccgtggccacgaccatcgaccagacattcgtgaagaccttggcgagcgtggcgctggatttggtttccaacgtggccgattacgcgcaaagcccgcaaatggagcagtacgtcaacaacgccaccagtcatattgccaccatgtcgtctcgtttgaccggcactgcgtcgcagatggattcctatgccaatctgctcggggccgccaacagcatcattgattccaccgataagctgctggggtcaacaggctcagctgcggccacaaccaaaaaggcgttgaaacagacccgcaacggcgtctccagcctcgacaaggcattgtccggagccaccgatggcgtcggtacggcattgcagcaggccggttcatcctacgacaccattgccaagcaaatcgatgccgcttttgccgatgtgggctcacaatcctcacagatatcaaacaagctaaccgatatgcaattcaaagtggaggctcaggctgacagctttggaaagtatgccgccgctttacgagatctcgccaaacaagcggcttcactgcccgtgggcggagataccgttgccgctcaactgaacgcggctgcagaccaagccacaaaggcgcagcagagcatgcagcaagccgccaccgcgttgggcgatgcggccacgcacatagcaaacggtactgccgatgccgatacagcgcgtcgagatctgaaatcacaaatcgctgccgccaaacaatcgattactcaggcttcagacacgtacaagagcacgctgaaaccgcaactgaacaatctgacctcgtccatggacgaagtggccacgcaggcaagttccgtaatcgacgggcttgcatcgaccgtcagcagcgtgtcaggcctttctggcggcgtttcagacagcctgacggacatccagtcggccttgactgacgcagctagcgctttgacccgttcggcgaagaaactcgacaacttgtcttcccaactcgcctctatcaccaatggcggcaccatcgacctgtctgtgatttcctctgcgaagcccgatgccattgcttccatgctggcggcacccgtagcggtcgaccgcatcgcgctctatcccgttgccaactatggttccgcgatggctccgttctacacgattttgtctatttgggtcggtgcgatcattctggtcgccatgttgaaagtatcgatttccgaccatgagaaggctcgtatcttagggttgggcaatgatctgccgctcggttcggaagtgggtcttcgcgaggccatgattgccgggcggattgccggaccggccgccgcgttggatgtgctgaagaagccgcgtgccgaggctcccggcaatgcgcggcagttcggtttacgcttgcaccacgaatatttcggccgatacatgattttcggtttccttgctttgctgcaaggtacgctggtgtgcctgggcgatatgttctatctcggcgtgcagtgtgagcatccgattcagttcttgatggtcgggtggttgtctgcactggtgttctcgaatattgtgtatacgctgaccctgtcgttcggtgatatcggcaaagccattgccgtagtactgctggttatgcaggtagccggttccggcggcacattccccattgaaacactgccgacgttcttccaggtcgtttctaaatggctactgttcccctatgcggtggatgcgatgcattcggccatggcaggctcattcggcatggaatactgggtttccatgggcaaactggcactgttccttgtcccctcattgctgttgggacttatgttgcgcaagccggtaattcgcttcaacgattgggttatccgcaaccttgaaaacaccaaggtgatgtaagtgttggacgaagtgtgtccgagcgccctgaacgcttagcagcctacgacctgacgtgtttggaccgtaacctgtctcagacacggcgttggcgaggcctgtggagcttctgacgctaacgtctacgtggcttgtagccctttttacgactgtgtggcttgagttgctggttcagcggtacatgccggtaactggattgcggatcgcgatgcgtgagatgccagcatccgcaaaattcgcaacggtacacccatagctcgactccgcgctcgatcaggctttgatcagcggcacgctgagcctgcgccttatcgtgatacatgattttattcgacgtagcgcaacgtttaggggtgaagtaatgcatagcagaagccagtgtagagcgaccccataaccaagccagtttctggctcccctcaggggggggccgtccgcacagcagaccggggggaggaggcccgggcgtcgggattccacggtcacggacgtgctgttttccggatttcctgcggaaatgggaacgcgccgcgccgtctctcttcggccccgacggcggggccggccgggaatggtcccggacgtgggtctcatgagtgcgagaagccccgggtgtttttgtgggggtgtgtgggttcgggtcgtgagtgtttcggatatgggaaagccccttggggcgtgtgctccgaggggcttcctgtacgtgtgatgcggcggcgtgctactctcccacaccctgtcgggtgcagtaccatcgccgtgccaggccttagcttccgggttcggaatgggaccgggcgtctcacctgggccatggccgccgcaaatcttctcttatacggtcagacgctggggtctgccggcctgtggcggcctgggaaccggacagcggacgcggatatgtcgatgtttcgtcttgtggccagacaatgctcattgccgtctggtgccgtttgcaggaggaagatgcggtccaaccgccaggggctggaatgttagtgttgcctttcgtccgttagtaccggtcggctccacccctcgcggggcttccacgtccggcctatcgaccacgtgttctgcatggggactacaggaactcgaaggttccacggaatgcttatcttggagcaggcttcccgcttagatgctttcagcggttatcccttccgaacgtagccaaccggccgtgccactggcgtgacaaccggcataccagaggttcgtccacccaggtcctctcgtactatgggcaggcctcctcagcattccaacgagcgcagaggatagagaccaaactgtctcacgacgttctgaacccagctcgcgtgccgctttaatcggcgaacagccgaacccttgggacctgctccagccccaggatgcgacgagccgacatcgaggtgccaaaccatcccgtcgatatggactcttgggaatgatcagcctgttatccccggggtaccttttatccgttgagcgatgccgcgtccgtacaccggcaccggatcactagtcccgactttcgtccctgctcggaccgtcgtcctcgcagtcaagcccgcttgtgcacttgcactcgccacccgattgccaaccgggctgagcggacctttgggcgcctccgttactctttgggaggcaaccgccccagttaaactacccgccaggcactgtccctgaacaggatgactgttcgaggttagacatccaatgcgaacagagcggtatttcaccttacggctccgcgcgatctggcgaccgcgcctctcggcctcccgcctatgctacacaatccacaccgaatgccaataccaaggtatagtaaaggtcccggggtcttttcgtccttctgcgcttaacgagcatctttactcgtactgcaatttcgccgagctcctggtcgagacagtggggaagtcgttacgccattcgtgcaggtcggaacttacccgacaaggaatttcgctaccttaggatggttatagttaccaccgccgtttaccggggcttgaattcaccgcttcacccgaaggctgacggatcctcttaaccttccggcaccgggcaggcgtcagtgcatatacagcggcttgcgccttcgcatgcacctgtgtttttggtaaacagtcgctaccccctggtctgtgccacccccaaaagctccccgcgcgaggcggttcaccatcgggggtctcccttaaaccgaaggaacgggagtgatttgccgagttccttgaccaggattcgctcgatcgctttggtattctctacctgaccaccagtgtcggtttggggtacgggcggcttcgagcctgacgccgaagcttttctcggcagccgggatcaccggatatcgggccataaggcccccatcatcgcacctcggacccatgcgggacggatttgcctgtcccacgccctgcgtgcttgaccacggaagaccacctccgcggccggctacccttctgcgtcactcctgcgctgacctactacaaggatcggtcccaacaggccagggcatcccgcccccgaaggagcagtaagcccggacccggaggttagtactccaagcctcggttttggcggctgaaagccggtacgggaatatcgacccgttcatccattcgactacgcctgtcggcctcgccttaggacccgactcacccagggacgatgaacgtggccctggaacccttggtcatccagcggacgggatcttcacccgtctctcgctactcatgtctgcattctcactcccatgaagtccacggcgcgttcacacggccgcttcgcccctcatgggacgctctcctacccagtacaaaatactgccgcgtcttcggtggtgtgcttgagccccgctacattgtcggcgcggaaccactagaccagtgagctgttacgcactctttcaagggtggctgcttctgagccaacctcctggctgtctatgcgactccacatcctttcccacttagcacacgcttcgggaccttagacgacggtctgggctgtttccctttcgacgacgaagcttatcccccgccgactcactgccgggatacgcgtcaccggtattcggagtttggttgctgttggtacccgatacgggcccgcaagcatccagtagctctacccccgggacgtaatgacccgacgctgcacccaaatgcatttcggagagaaccagctatcacggaatttgattggcctttcacccctagccccaagtcatccccccggttttcaacccaggtgggttcggtcctccacgcggtcttacccgcgcttcaacctgctcagggctagatcatcccgcttcgggtccaggacacgcgactcaaacgccttttaagactcgccttcgctacgcataccccacacgggttatgctcgccacatgccactgactcgcagactcatttttcgataggcacgccgtcaccccacaaaagggctccgacggattgtaggcgcacggtttcagagactgtttcactcccctcccggggtacttttcacctttccctcacggtactcgttcgctatcggtcagacaggaatattcaggcttacccaacggtctgggcggattcgcacggggttccacgggacccgtgctacttgggagacgcgatcggcagaccatgcgcgttcaggtacggggccctcaccctctgcggcccggtattcaacccggttcccctgacacatggttttctgcaactgccggccggcccgtcggagccggcgcacgcgatcccgcaacaccccgcgcgcaacccccgacgggtatcacacgcgcaaggtttggccatcatccgctttcgctcgccactactcacggaatatcctttcctgcaggtactgagatgtttcacttccctgcgtaccccccggccgaagccggtaccgacccatgacggtcggtgggttcccccattcggaaatcctcggatcaaagccctgttggcggctccccgaggcatatcgcagcctcaaacgtccttcatcggtcctgtctgccaaggcatccaccatacgcccttgcaagcaacacacaccacgaaagtgcatggccgcaagattcctctagcaaattcccagacgacaaatcatcacactaaaaatgatcacaaaacgatcgaaacgaacaatagagttcgattcgaaatcaacagcaaaacaaagattcaaaaacccttgttttgctcgcgtccactatccagttctcaagccaccacgcaccgccacgccatcgcgccggcacacggccggcccccaggcacgacgggcatcgaatcgcgccaggcaaaaagcctggggtggcgatccgggagcccaaaagcgcatccgcaccaccccggcacccaccgcacgaccggcggggcaaagccaacgacgtcttccacaccagcaaccccgccgccatcgcaccatgcgacgcgcggggcgcacaccgtcggacgaacatccgactgaattctccgtagaaaggaggtgatccagccgcaccttccggtacggctaccttgttacgacttagtcccaatcacgagcctcaccttagacggctccatcccacaaggggttaggccaccggcttcgggtgctgcccactttcatgacttgacgggcggtgtgtacaaggcccgggaacgcattcaccgcgacgttgctgattcgcgattactagcgactccgccttcacgcagtcgagttgcagactgcgatccgaactgagaccggttttcagggatccgctccgcgtcgccgcgtcgcatcccgttgtaccggccattgtagcatgcgtgaagccctggacgtaaggggcatgatgatctgacgtcatccccaccttcctccgagttaaccccggcggtcccccgtgagttcccggcataatccgctggcaacacggggcgagggttgcgctcgttgcgggacttaacccaacatctcacgacacgagctgacgacgaccatgcaccacctgtgaacccgccccgaagggaagccgcatctctacgaccgtcgggaacatgtcaagcccaggtaaggttcttcgcgttgcatcgaattaatccgcatgctccgccgcttgtgcgggcccccgtcaatttctttgagttttagccttgcggccgtactccccaggcgggatgcttaacgcgttagctccgacacggaacccgtggaacgggccccacatccagcatccaccgtttacggcgtggactaccagggtatctaatcctgttcgctccccacgctttcgctcctcagcgtcagtaacggcccagagacctgccttcgccattggtgttcttcccgatatctacacattccaccgttacaccgggaattccagtctcccctaccgcactcaagcccgcccgtacccggcgcggatccaccgttaagcgatggactttcacaccggacgcgacgaaccgcctacgagccctttacgcccaataattccggataacgcttgcaccctacgtattaccgcggctgctggcacgtagttagccggtgcttattcaacgggtaaactcactctcgcttgctccccgataaaagaggtttacaacccgaaggcctccatccctcacgcggcgtcgctgcatcaggcttgcgcccattgtgcaatattccccactgctgcctcccgtaggagtctgggccgtatctcagtcccaatgtggccggtcgccctctcaggccggctacccgtcgaagccacggtgggccgttaccccgccgtcaagctgataggacgcgaccccatcccataccgcgaaagctttcccagaagaccatgcgatcaactggagcatccggcattaccacccgtttccaggagctattccggtgtatggggcaggtcggtcacgcattactcacccgttcgccactctcaccaccaagcaaagcccgatggatcccgttcgacttgcatgtgttaagcacgccgccagcgttcatcctgagccagaatcgaaccctccacaaaaaacctcatgaaaagcatccgaatagatgactctcaaaacaaaaattgacgagcacgtccttaaggaaggacgccctcaaaaaacctcacccctcatcaaaccctcccgggtacccaaccaccacgacaggcaatcaggcgaggaatgaactggcaatcattgactataaagaagtagtacaaacacgctcttgagttctcaaaccaccaccactcacccacctcgcggccctccggaaggagaaccactcgccgagcggcagcaagggaataacttacacgcattcgcggactcgcgcaaaccgggcacgaaaaaacacgccagaatcgttgcaacgacgtcgttccatcggcgtgtcgaaatcgacgtttcgcacgcccatatcctcagtccagaacaagacaccgtcgaaaaacggattgaaaaatttggccgatgggcgtgtcgcgaatcacctcttacggcgcatgcggcgcaccgccaattatcggaatcatcattgatccagcacaccgataagaaccattatgtccggatcactatccgctcgccagtcgcgcaccaatcaaccgcctggtagcgatgcggttgccgtaccgcttgccctggcacgaccaacgaccgaatggcatcagcacattcagaaccgccggtccgatccacacatcgcagcacggatcagtcgtggtcccacgggtacggggaggccccgtcgccgtgtgggtgccggaggcgtcctgtttgtgtccgggcatgcgagaagccccgggtgtttttgtgggggggtgtgggttcgggtcgtgagtgtttcggatatgggaaagccccttggggcgtgtgctccgaggggcttcctgtacgtgtgatgcggcggcgtgctactctcccacaccctgtcgggtgcagtaccatcgccgtgccaggccttagcttccgggttcggaatgggaccgggcgtctcacctgggccatggccgccgcaaatcttctcttatacggtcagacgctggggtctgccggcctgtggcggcctgggaaccggacagcggacgcggatatgtcgatgtttcgtcttgtggccagacaatgctcattgccgtctggtgccgtttgcaggaggaagatgcggtccaaccgccaggggctggaatgttagtgttgcctttcgtccgttagtaccggtcggctccacccctcgcggggcttccacgtccggcctatcgaccacgtgttctgcatggggactacaggaactcgaaggttccacggaatgcttatcttggagcaggcttcccgcttagatgctttcagcggttatcccttccgaacgtagccaaccggccgtgccactggcgtgacaaccggcataccagaggttcgtccacccaggtcctctcgtactatgggcaggcctcctcagcattccaacgagcgcagaggatagagaccaaactgtctcacgacgttctgaacccagctcgcgtgccgctttaatcggcgaacagccgaacccttgggacctgctccagccccaggatgcgacgagccgacatcgaggtgccaaaccatcccgtcgatatggactcttgggaatgatcagcctgttatccccggggtaccttttatccgttgagcgatgccgcgtccgtacaccggcaccggatcactagtcccgactttcgtccctgctcggaccgtcgtcctcgcagtcaagcccgcttgtgcacttgcactcgccacccgattgccaaccgggctgagcggacctttgggcgcctccgttactctttgggaggcaaccgccccagttaaactacccgccaggcactgtccctgaacaggatgactgttcgaggttagacatccaatgcgaacagagcggtatttcaccttacggctccgcgcgatctggcgaccgcgcctctcggcctcccgcctatgctacacaatccacaccgaatgccaataccaaggtatagtaaaggtcccggggtcttttcgtccttctgcgcttaacgagcatctttactcgtactgcaatttcgccgagctcctggtcgagacagtggggaagtcgttacgccattcgtgcaggtcggaacttacccgacaaggaatttcgctaccttaggatggttatagttaccaccgccgtttaccggggcttgaattcaccgcttcacccgaaggctgacggatcctcttaaccttccggcaccgggcaggcgtcagtgcatatacagcggcttgcgccttcgcatgcacctgtgtttttggtaaacagtcgctaccccctggtctgtgccacccccaaaagctccccgcgcgaggcggttcaccatcgggggtctcccttaaaccgaaggaacgggagtgatttgccgagttccttgaccaggattcgctcgatcgctttggtattctctacctgaccaccagtgtcggtttggggtacgggcggcttcgagcctgacgccgaagcttttctcggcagccgggatcaccggatatcgggccataaggcccccatcatcgcacctcggacccatgcgggacggatttgcctgtcccacgccctgcgtgcttgaccacggaagaccacctccgcggccggctacccttctgcgtcactcctgcgctgacctactacaaggatcggtcccaacaggccagggcatcccgcccccgaaggagcagtaagcccggacccggaggttagtactccaagcctcggttttggcggctgaaagccggtacgggaatatcgacccgttcatccattcgactacgcctgtcggcctcgccttaggacccgactcacccagggacgatgaacgtggccctggaacccttggtcatccagcggacgggatcttcacccgtctctcgctactcatgtctgcattctcactcccatgaagtccacggcgcgttcacacggccgcttcgcccctcatgggacgctctcctacccagtacaaaatactgccgcgtcttcggtggtgtgcttgagccccgctacattgtcggcgcggaaccactagaccagtgagctgttacgcactctttcaagggtggctgcttctgagccaacctcctggctgtctatgcgactccacatcctttcccacttagcacacgcttcgggaccttagacgacggtctgggctgtttccctttcgacgacgaagcttatcccccgccgactcactgccgggatacgcgtcaccggtattcggagtttggttgctgttggtacccgatacgggcccgcaagcatccagtagctctacccccgggacgtaatgacccgacgctgcacccaaatgcatttcggagagaaccagctatcacggaatttgattggcctttcacccctagccccaagtcatccccccggttttcaacccaggtgggttcggtcctccacgcggtcttacccgcgcttcaacctgctcagggctagatcatcccgcttcgggtccaggacacgcgactcaaacgccttttaagactcgccttcgctacgcataccccacacgggttatgctcgccacatgccactgactcgcagactcatttttcgataggcacgccgtcaccccacaaaagggctccgacggattgtaggcgcacggtttcagagactgtttcactcccctcccggggtacttttcacctttccctcacggtactcgttcgctatcggtcagacaggaatattcaggcttacccaacggtctgggcggattcgcacggggttccacgggacccgtgctacttgggagacgcgatcggcagaccatgcgcgttcaggtacggggccctcaccctctgcggcccggtattcaacccggttcccctgacacatggttttctgcaactgccggccggcccgtcggagccggcgcacgcgatcccgcaacaccccgcgcgcaacccccgacgggtatcacacgcgcaaggtttggccatcatccgctttcgctcgccactactcacggaatatcctttcctgcaggtactgagatgtttcacttccctgcgtaccccccggccgaagccggtaccgacccatgacggtcggtgggttcccccattcggaaatcctcggatcaaagccctgttggcggctccccgaggcatatcgcagcctcaaacgtccttcatcggtcctgtctgccaaggcatccaccatacgcccttgcaagcaacacacaccacgaaagtgcatggccgcaagattcctctagcaaattcccagacgacaaatcatcacactaaaaatgatcacaaaacgatcgaaacgaacaatagagttcgattcgaaatcaacagcaaaacaaagattcaaaaacccttgttttgctcgcgtccactatccagttctcaagccaccacgcaccgccacgccatcgcgccggcacacggccggcccccaggcacgacgggcatcgaatcgcgccaggcaaaaagcctggggtggcgatccgggagcccaaaagcgcatccgcaccaccccggcacccaccgcacgaccggcggggcaaagccaacgacgtcttccacaccagcaaccccgccgccatcgcaccatgcgacgcgcggggcgcacaccgtcggacgaacatccgactgaattctccgtagaaaggaggtgatccagccgcaccttccggtacggctaccttgttacgacttagtcccaatcacgagcctcaccttagacggctccatcccacaaggggttaggccaccggcttcgggtgctgcccactttcatgacttgacgggcggtgtgtacaaggcccgggaacgcattcaccgcgacgttgctgattcgcgattactagcgactccgccttcacgcagtcgagttgcagactgcgatccgaactgagaccggttttcagggatccgctccgcgtcgccgcgtcgcatcccgttgtaccggccattgtagcatgcgtgaagccctggacgtaaggggcatgatgatctgacgtcatccccaccttcctccgagttaaccccggcggtcccccgtgagttcccggcataatccgctggcaacacggggcgagggttgcgctcgttgcgggacttaacccaacatctcacgacacgagctgacgacgaccatgcaccacctgtgaacccgccccgaagggaagccgtatctctacgaccgtcgggaacatgtcaagcccaggtaaggttcttcgcgttgcatcgaattaatccgcatgctccgccgcttgtgcgggcccccgtcaatttctttgagttttagccttgcggccgtactccccaggcgggatgcttaacgcgttagctccgacacggaacccgtggaacgggccccacatccagcatccaccgtttacggcgtggactaccagggtatctaatcctgttcgctccccacgctttcgctcctcagcgtcagtaacggcccagagacctgccttcgccattggtgttcttcccgatatctacacattccaccgttacaccgggaattccagtctcccctaccgcactcaagcccgcccgtacccggcgcggatccaccgttaagcgatggactttcacaccggacgcgacgaaccgcctacgagccctttacgcccaataattccggataacgcttgcaccctacgtattaccgcggctgctggcacgtagttagccggtgcttattcaacgggtaaactcactctcgcttgctccccgataaaagaggtttacaacccgaaggcctccatccctcacgcggcgtcgctgcatcaggcttgcgcccattgtgcaatattccccactgctgcctcccgtaggagtctgggccgtatctcagtcccaatgtggccggtcgccctctcaggccggctacccgtcgaagccacggtgggccgttaccccgccgtcaagctgataggacgcgaccccatcccataccgcgaaagctttcccagaagaccatgcgatcaactggagcatccggcattaccacccgtttccaggagctattccggtgtatggggcaggtcggtcacgcattactcacccgttcgccactctcaccaccaagcaaagcccgatggatcccgttcgacttgcatgtgttaagcacgccgccagcgttcatcctgagccagaatcgaaccctccacaaaaaaaacttcatgaaaagcatccgaatagatgactctcaaaacaaaaattgacgagcacgtccttaaggaaggacgccctcaaaaaacctcacccctcatcaaaccctcccgggtacccaaccaccacgacaggcaatcaggcgaggaatgaactggcaatcattgactataaagaagtagtacaaacacgctcttgagttctcaaaccaccaccacaccagccagacgggaaaccaaccagaggaaggaacccgccgcgctgagcggcaacaggtgaataacttacacgcatgtccggattcacgcaaatcaaggcgcacaaaaaccccaggaatcggcataacagcgcggttccctcggcgtgtcgcacagagcccactttgctctgatgaggctaggttaacccctcaaatgtttctgaaaagcatcaaatccactattcggctggcgtgtcgcgagagttttcagcttgtcggccctgcgttcatctctcggcaaccacactgccggcgcacaatcggcgcatgacagcgctccgtcatcggatttcgttcatgaatcgcgggtatacctgtagttatgaccaagaagattgctgtattaaccggggcgggcatttccacgtccgccggcatccctgatttccgcggtccggacggtgtgtggaccaagcatcctgaccaaatgagcgtttacgacatcgatctgttcctgcgcaacaaagaggaccgcgagtactcctggcgctggcaaaaggaatcgccagtatggaatgcgcagcccggcactgcgcataaggcgctggtcaagctggaacaagccggcatgctgacgctgctggccacgcagaacttcgatgcgctgcatgagaaggccggcaacagcgacaacgtcatcgtgaacctgcacggcactatcggcacctcgcattgcatgaagtgccatcaggaatatgccacggcggacatcatggcccgtttggatgaagagcccgacccacattgccatcgcaaactgaagtatcgtggcgatatgccgtgcaatggcattatcaaaaccgatgtggtgtatttcggtgaggcgttgccggacggcgcgatggagaagtcgtacagtctggccaccaaagccgacgaactatgggtaatcggatcgacccttgaggtgtacccggcggcgagcattgtgccggtggccgcgcaggcgggcgtgcccatcaccattatgaatatgggtcacacgcaatatgaccatcttgcgagccgcttgattcatgaggatatcgccgttgccctgccgaagttggtggacgagacgattgcggagaacaagtagccctcagcataacgaaagcgccggtgggtgggttaagcaactgatgattgttggttaaccacccaccggcgcttttgcgccacctcccgccagcgggaggtattggagcacacttctgcgcggcttcccgccagcggtattggaatcagtagatgcgcttgggctggaatccggcttccctgagtgccgcgaggatgcggtcgatgtgctcggggccgttggtctcgaccgtgacgccgagagacaccgcgttggtgtagtggccggatgccttgaactggtcgtgatcaagctgaatgacgttggcgcgctgctcggcaagcagggtggccaccttgacgagctggcccggagtatccggcagctcgacctcgaagttcatgatgcggccgcgggcgatcatacctttctgaatcaccgcacccatggtcacggtgtcgatattgccgccggacataatcggaaccaccacgtgcgggccggtggcggcggcgaacttgcgcgaacgcaggttcaggtgttccagcgcagccagcgaaacggcgccggccgcctcgaccaccagcttatgcttctcgagcatgagcagaatcatttcgttgatgtcgcgctcggtgacggtgaccagatcgtccaggaactcgttaatcagagcgaagggcaggtcgccggggtgcttgaccgcaacaccttcggcggaggtaaccacatggtcagccggagacacacgacccgcggccagcgagtccttccaggccggtgagccctccggaatcgcaccgattacgcgcacttcaggcttgaatgtcttgatggcgagcgccacgccggcacccaggccaccaccaccgagcggcacgaccacgtcagtgacgttcggcacgtcttcaaggatctccagaccgatggtgccttggccgcagatgacttcgtaatcgtcgaatggcggcacgtaaatcatgccttccttgtcggcgagctcagcagcgtgggcggcggattcatcgaacacatcgccgtacagcaccacgtcggcaccgtaggccttggtggcatcgaccttcagcggcggggtgatctgcggcatgcagatggtggccttggctccacgctcgcgggccgcataggccacaccctgggcatggttgccggcagacgcggtgacgatgccacgggcgatctgctcttcggtgagcgatgcgatcttgttgtacgcgccgcgaatcttgaaggaaccggtgacctgcaggttttccggcttcaggagaatctcatggccggtcatctcgctcagcaccggagaaggaatgatctccgtgtgacgggcagtccctttgagacgtttggcggccagcttcagttcggctgcatgatcacgctgcagcgccttcaaaacatccttttgttccatagctttccattgtaagcaccacaatgccgagagacaccggctatctcgcttcacagaggtacattcggcctcttgcagacagctatctgttttcacaggggtaccgagcatcgaaaaccccgggtataagccttgattttcaatgcttatacctggggtttcgacgttacggtacctctttcaaggcggatagcatttcgcaatagccctgaagtatctctgtgaacggagaaaggtactcaatccgctacaatcgctccaatcgctacagctgaatgacggcggcctcccaaggatcgagctcacggttggcgagggaagccacggcgtgcggggcatcatacgtgctgattaccacgttcgactcggtgattccggcggcggccagttcggcggtttcgcgcggtagatcaacggttcggccggacatgttgaccacgaccagcagcttctcatcgccgagggtgcgggtgaaggcgtagacatgcgcgtcatccgcatcgagcagatgccagtcgccggccgccacgacaggcatgtcgtggcgcagcgcgatgagctgcttgtagaaggcatataccgaatccggatcgtcgaattcgccggccgcgttgatcgccgcatggttgggattgacggagatccatggctccttagcggcatccggcgcagtgaaaccggcatagacagagccgtcccattgcatcggggtacgcgaattatcacgaccgcgcgcggcgatacccgccaacatcgattcgggcgactgcactttggcttcctcaaccctttgacggtaagcgttcagggactcgaggtcacggtactggtctaggcgcgtgaagtgggcgtcggtcatgcctagctcttcgccctgatatatgtacggggtgccgcgatgcatgtgcagcatcaggccaagtgccttggccgaacgcacacgagattcctccgaggagtcatcaccccaacgagaaacgacgcgaggctggtcgtggttaccagtaaacaggcttgcccagcctgcattcttcacggccgcttgataaccggccataatgctcttgagcttcggcaggtcaagtggcagtggcttccatttgacgccttcgcagtcaaaatcaacgtgctcgaataggaagagcatgtccagctcgccgttggcggggtcggtgatgtattcgttgcgctgtgcggtaacgccgggagcctcgcccacggtgaggaagccctcacggccttcgaacacttcacggcgcatttcggccaggaattcgtcttggcgagggccgtccgcgcagaacggattcgggttggaatagccttcctcacccacgggcagatcgtccagctcggaaccgtactcgccgggcagcttgccagacaggtccgtgcgcttggaaatcagcgtaatcacatccatgcggaaaccgtcaacgccgcggtcaagccaccagttcatcatgtcgtataccgcgcggcgcacagccggtttttcccagttgaggtccggctgcttcttcgagaactgatgcaggtagtattcgccacgctcagggcaatactcccatgcagaaccgccaaagtaggagccccactggttgggctcggcaccgggctcgccggcagtggtgccgggacgggcgggacgccaccaataccagtcggcgtgctcatcatccttgtttttggacgcttcaaaccaggcgtgttcatcggaagtgtgattgacaacaagatccatcacgatcttgagcccgcgcttgtgggcctcggccagcagctcatccatgtcgtcgagtgtgccgaacagaggatcaatgtcctgatagtcggaaatatcgtagccattatcgtcttgcggagacttgtataccggggatagccacagcacatccacgccgaggtcggccagatagtcgagccgtgacgtaatgcccttgagatcgccgaggccgtcgccgttggtgtcttggaaggaacgcgggtaaatctggtaaacgaccgcattggaccaccacggatttggggtggcaccgttggtgcggatggaatctggaattactgtgcgttgtgaagtggtcatcgttggctcctccattatttatggtctacattgcctgttgctcatagtctaaaaagcgctgaattacatttccattggggaactgcgttggtgtgccggaaacaaaaactgcaaagagccggaaggcactgctacggctcaattctcataagctgcacatgctatttagcaacatatgggccctttcgctgtttgtggtgggtgactgtgccgtggggtgatgttggtcgggtaggttggaggcatggatgcctctcacctgttcaccgccgcgcttcggctgcggtcgccttggagggtcgggtctgcggacttccgtgacgccgacggcgacgggcgggagccgcacatcacgatcggcttcgagcccggcagagggttcatgctcctgttcgaggcgtgggtgtggctatatcgcctgtgctcgtggatgatgcactcgaggctcgaacctatgaaggagctcgcccgcttgttccgccgccacttcgccaccataatctacctgacctgcggcagctcacatattaacggttcttctgattgcgacgcgcaagagcaacttcgggcgcgcttggattgtctgcttgaacccactggtgcggggatagatgatttagttgacacgcctgcgggaatctggtggggatttcgctggcacaccggatttcaagcaaaccccgcctcgggaaccgctccggacttcggcgttggcccggttcgtatgtcaatcgattgccgtctgaaccgggacagaatccgctgtcccggttcgcgatttttgcccttttttacaaacagggacaagccaatctccgcaggtcatatgctccgtaatacaaaatcggcggaatagagccgatcccggaatcaacatgttgtcccggttgtcacataaaacgattgacattcataccgggacaatgaaaattgtcccggttcgtgaaaatcgcccgaaaccgcgaaccgggacagcggattctgtcccggttcgcgcgtcaaacggttgatatgtggaccgggacaagccagtggcacggcgacacagcagatgcgctcaattgcaccgtaagccgtacggtttcgtcactttttcattcgcacaacgagcaaaaccacatgacctttgtgcgccaccgccacatcaaccgaccgtcgcctttattgtggcggtttccagtatggcaacaggacagaagagcctcctccggtgagagccggaggaggcttgggtggaagcggacctttacttcacagagtcctgcaattcaggactggcctacggccagacccaacatgacctcgcgagtacgcgacctatccggccgcccgggccgggaaacagcccacggggctgtttccttaatcggctcgtctcgctcgacgcggtgaagtaaagcagcgcctgcgctgttttacttcaccgctcccctcatcacaccaccgacgacccacttctgggcgaagatgtagacgatgaggatcggggccatggccatcaggtagctggagaaggccatcgggtagttggtggcgaactgcgagctgaagacgtactgggcgagcgggatggtctggttcgactgatcggtcagaatgatcaacggcaggaggaagtcgttccaggcccacagcgcggtcaggatggcgatggtggcgttaatcgggctcatcagcgggaagatgatggtccagaagatgcgccaggtggatgcgccatcgatgcgggcagcttcttccagcgataccggaatcgaacggatgaagccggtggcgatgaacaggttcgtgcccaggccgagcaccgtgtacagaatgatcaggccgacctggttgtccaggtgcagggagcccatctgcttcgcaatcggcagcatgacgaccgggaacggcacgaacatggcggcgatgaagaagtagtacaggaagcggaagaagcgcttgtccatgttgcgggccacggcgtaggccacgaaggtgttggtcagcagggtgagcaccacggcggccaccgtgatgatcgcggagttgagcgcggccttcgggtagttgaccttggcggaggcgtcggcgaagttatgccactgccacgaggtgggcagggcgaaggtgccggcttcggccggggtcttcagcgcggtgacgatggtgaagtagagcgggatcagaatggtcaggctcagcacggccacggcggcggtcagccaccagttgatcttgtggtctctgcggaacttggcgggcttgccggacttggacggggtaactgttgcagtagtcatttcttatcctcccctaaatcagatctgttcctggctgcgggagatgcgcagctgcacgaaggcgatgatcgccagcacgatgaagaagagcacggcgtttgcggtctggtaggcgtactcgccaccggtcaggccacccttccagatgaggtaggtgacggtttcggtggaggagttcgggccgccctcggtcaaggcgacgacctgatcgaaggtgccgagcgcgttcttcatggacagcacgaggttgatggtgaagaacggtccgatcagcgggaatgtgatcttccagaacttctgccaggcgttgacgccgtcgatggcggcggcctcgtagatttcgtcgtcgatggtctgcaggccggcgaggtagatgagtaccgagtaggcgatgccctgccagacggcgaggaagacgattgggatccagctgagttgctcattggtcaacaacgaggtggacagccacttgatgcccagcgccttgccgagctcgggcagcgggttcatgaagatgtacttgaacacgtagccgatgaccagcacggagagggtgtaggggatgaagaagatggctcggaagccattcttgaaggcgatcttcgagttcagcagcaccgacaggaacagggcgatcacattaatcagcaccgtgatgagaatggcgatgaggaacgtgaacaggtaggcgtggcccacgcggttgtcttggaagagggcgatgtagttcttcaggccgatgaacttgtaatcgccgtagccctgcgagttggtgaaggaatactttatgccgtcaagaaatggcaggtacaggaagaaggcgaaaatgatagccgccggaaccaccatccagtagtaggcggggtccaccttgcgggtggagaaggcggagaccttcttcttggccggtttcttggcagcggtcttggttgcggttgcgtgtgacatgatgttctcctctcctaccgatcactcgaaggtcctggcttggaccttgtcccattcggtctgcatctggttcaggaaacggtcggtgttgccggaggtcaccatggtctgcaggtagccgccgatgttgatggacgaaggaatgtagtggtcgcagaagtcggccagtcggttttcctcgaagaacgggcgcacggtttccagcgcatcgttgccgaagtaggtgtccttcagcggcgtgatggcggactgggcgtcggcgtaggcgtcaagctgatccttctgcatgaggaattcgacgagcttcatcgcttccttggggtgcttggtgttcgcaccgatggtgagcatcacgtcgtcgccggcggtgaggatctgctcgctggcgtcatcggtggccggcatctgggcgaaaccaagttcgatatcggggttgatcagcaggatctgcgggatggcgtaggtgccgagcgggatgatcgcggccttgccttgggcgaagttctgcgtgccctgctggtaggtgacgccggtgtccgcagtggagtaggtgaagagctcggattccttctcgactgtggtcttccacagttcctggaacgtggtcttgccttgcttgagctcggtgtacttcgattcgggaaccagcgtgccggccagggaggcgagcggtgcctgggtggtccagccgtcggccacggaaccctgcagcgggttgatgccggcgtccttgaaggtgttgagcatatcggtgaactcgctccaggtggtcggcgggttctccgggtcaaggccaaccttgcggaacagagccttgttatagatgtagccggaggcgttacccgcgaagggcaggccatacaggcgcttcttggaggaatcggtggtctgcaccagattcttggcgatctgcaccatgccggggttgagggtgtccacaatgggttcatcggtgaagtcgtagaacacaccggaggcggcgaagttgccgaagctgatgtcgccgttgaaggtgatcacgtccggcacgcgattcttgacgaagcgggtgcgcagatcggtctgggcgttggcggagttgttgatgttgaccttgatggtcgggttttgcttctcaaagtcggcgaccatggacttgaactggtcggcggcctcggacttgaactggaagaaatccagcgtgacggtgcctgcggtgctggagccgcagcctgccaggccgaagccgacggcgatcgcgcacaccacggcggcggtgcgcacggccagacgcttcagtctaggcgttgcatgtggggaatcggacagcataattgttgactcctttatctttcttttcctccggcttcggtgccggcggttcttccactttctaaggtaacagttcggccatttcattcccagcgccagcgagcccacttgcgcaagcaacaaaaagcgcggtattttgtgattaacgcaataaatacagcgaggggggcttgcatgtctgatgccaacgcgattccacagtggttttccggatccgagcatacgcatcgcgtggcggcggcaattgcccaatacgggccgatagcccgcactacgttggcacagatgctgggactgagccaaggggccttgtcccgcatcaccagcgatctgatctacgccggggtgatcgaggagcttccggccgaggccggcccgtcaggcaagctgcccgagcgattcgcgccaagggaaagttcggatcgtcgcggacgcccgcagacttcgctggtgttgtgttcgaacgcacgcaccttcattggtgtcaaggttcatgggatgtcgattgtggccgctgcggtgaacgcgcatggcgaggtggtgtccggccggcacgaggtgccgatcggggcggatcaatcggctgagtatgtggtgtcggccatcacgcggctggtgcgcgaatgttccgccgatatcgcctcttccggactgccctcccccactgcggtgggcgttgcggtaggtgggcatgtggtcgacgattcgattgtgacgttcgcgccgttcctgcattgggacggggccacggacttggggacgatggtcacagaggcgaccggcctgccgtgcggggtgttcaatgatatcgattctctgctggtggatgcctcctggttcgggccgggtgtcggcgtggatatgttcgccgtggtgaccatcggcgtgggtgttggttattcgctggccgtgaacggcaagccagtgcagtacccggataagagctatggtctggtgggccacgtgcttatcgatccggaggggccgcgctgcaccagcggacatatcggctgttcacaatgcttgactgacgattcaatcgccgaacagtactctgcgattgtgggtcgcgcggtcagttttgaggactttgcgcgcgatgccaaggaacgcgtgccgcaggccacgcagttggtgaaccggacgtgtttccggttgggatcgctggtggctacggtggcgaacatcgcgatgcccgggcatgtgatgattgccggggagtccgcgtttttggccaagctcggcaccgattcgctacgtgacggcattcgtttctaccgtcacagccagacccagccggtcaagttcacgattatgaaccacgactggcagctctgggccaaagccgccgccagtcgcgtgattgtgaagcatattgggtaggccgttcttggctcccctcagagaggggagccaagaacgttgcttcgccacagttactccgtcacgaccagcaattacggacttgcctatcggcaaggctcaatctcaccttcgctcaggccgtggctactgacagcctactaggctgtcagcttaacgccacagccttgagcaatactgcctgctgggggtggagggacggaggacgaatgccgtagcgctgcagggcttcgccggtcaggactacaccttcctcgttccaccagccgagagtgctctggccgttggtcagaccggtcaaatccaagctcgggtcaagcgggctgacacggtaggtgcgctcggggtcaagtccgggcagatgcacaggcgcggccggataggtctggctggtggtcagctgggtgaagcggtagatggcggcgtcacggttcggcatcaccataccgtccagacgcacggccggatcgttggagtcggcgtgcacgcaggtgtcgatggcgaaccagtcgcggtgcttcttgaattcggccacccacacggccagcttggcgagcgcctcgtccggctccttcaacaggttccattcgatgcccatgtgaccgaagaacgccatggccatgcgcagttcctggctggtggcgcgctgggtggagtgtgcggggctggcgcccacgtgctcgcccatcatcgccggcggcaccagcagcgaggtgtagcgctggatgtccgcgcgctcgaccgggtccacgcagtcggagacccagatacgatcggcgtgctccaggatgccaagatccacgcggccgccaccagaggagcagctttcgatctcaaggcccggatgtgcggtcttgaggcccttgaagatgttgtagacggcaagggtctgcgcgtgcacggccgggcggccggagcggcgggaaccgggctcggtgacgagcttgttgtggtcccacttgatgtagtcgataccaagctcgccgacaagctggtccatgcagccgtagatgtagtcgaacgcatccggattggtcagatcgagcacctgctgagtgcggccctgcagcggcagtcggccagcggtgggcgagagaatccaatcagggtggttacgggccacatcggaatcggggttgaccatttccggctcgaaccacaagccgaattccatacccttggcgtgcacgtagtcggcgagcgccttcagggacttcgggccatcgggccagacgtcctgcgcaatctgccagtcaccgaggccggaggtgtcgtcgcggcgggaaccgaaccaaccgtcatccaccacgaatcgttccacgccggagtcggcggccctgtcggcgagtgccttcagcgtatcgaagttgtggtcgaagtacacggcttcccacgtgttgaggatcaccggacggccgtgcgagaacaggcgcggatgcagggagcgcacgtaggagtggaagcgggcggcgatctcattgaggccatcgccataggagccgaacagccacggggtgtcgtaggagttctggccttcgccggggccggcgagcgtcacttcgccgccgaacaggagttcgccgccgccgattacgccggtcgtgtagggcagacgttcggcggacagtacggagttgccgctccagcccacgtgcaccgaataggcgtcgccatgctcgaagccgaaaccgggcacgccggcggtcaggagcagggatgcgtcgaagtcagggcggccagcgagctgcggcttttcgaaacggccgacggtcagcggttggcgctgcgggctgcgttcacgtagatggtgaccggtggtggtgaggatttcgccggcggattcgggcagcgggaagccgagctcgatcttgccgatctcgagctgggctccggcgtctgcaccgaacaggttggttacggtggccttctgacgggccaggccgccggggagcagttcaaggtgccattcgacttccacgccctgctcctcatcgcgcgcggtgactatgacgccgggcacgcgggccgggccggtggcgcgggcatggccggccacatcggtgtagctttcgccggacacggcatcgagggtggcttccagcacgccgccggtctcgatgttggtcacggtgaacttggggaagagctcgacgccggcgcggcgcagcaccacgcgctgctcgccgatccagctttcggcctgggtgggcaggatggacggccaagcggtgtcgtcgagcgcgccggacacgcgctgcggcttcagggcgtcataggcggccagcagggtgtcgggcttggccagcgggcgaccccagtggacgatgcgcggcaggtcgctgccggcaaacaccagaccgatcgccacattggcggcgggctgggtcaggtagacggcggtgagtgcggtaccgtcagcggcggcaccggtgaaagtcgaggtgttctcggccatattgtctccttcgacgtgtgtggattggcattgcactactggtttcgatggtagaagaaatggaatatgttgccttggtgccgcgtgttggttgcgtgaggtaagtaatgcgtccgtgtctatcgccgctgggcgaagaaatcagtcaggatggactgacactcgccttccaacacgccgccgtgcacttcaggactatggccgatatgcggatcgcgcggaatatcccaaatcgaaccgcatgcaccgatcttgggatcccaggcaccgaacgcgatggtgccgatatgggtctggatgcaggcacccgcgcacatcgggcacggctcaagtgtgacggccagcgtgcaatcggcgagattccaggcgcccaaggcttgggccgcctgacgcatggcgatgatttcggcgtgggcaagcgggtcaccatcagcctcacgcgtgttgtatccgcgcccgacaatctggccggccgcatccagcaccaccgcaccaaccggtacgtcaccagcggctgcagcctgaccggccagttccagtgcgcggcgcatcgcctcgtcatattccataccaacgagtgtatgccttttctcatatcgtctcatgatgtgcataatcggccgcaagcttaacgttttcttcatggttcccatatacttttggtggagaaaaatttaagggagaaggcggcaacatggcggtatttgagctcatcctatgcatcattgcagcggtggtggtgagctcgtttgtcagtcgcttcgtgcccaaagtctccacgccgctggtccagattgtgctgggcgtgctggttacgtatctgccgtttttcccggatgcaacgctcgacccggaactgttcatggtgctgtttatcgcgccattgctgtatttggaagcccacgaaatcgataagtcggcgttgctgaaaacgctggatctgagcctatcgctggctatcggactggctatcgtcacgatggcggcggtcggattcactttgcatgccgtctggccttccatcaccttagcctcagccttagcactcggcgcggcactcggcccgaccgatgcggtggccgtcagctccctcggtaaagaagcctcgctgacgcagcgtcagcgcagcgtgctgaaaggcgaatcactcttcaatgacgcttccggcatcgtcggcttccagttcgctctggccgccgccttcactggagaattcgccgtggggcaggccgccggcgaattcgtgatctccttctttggcggcaccttatttggcctggtgatagcagcagcggccaactggctattcgagaccgtgcgatccctcggctgggaaaccactaccacacgtattctgatggaactgttcctgcccttcctgctgtatttgggcgcggaggaattcaatgtgtccggcattctgtcggtggtggccgctggcctgttcatccgattcgaccgcaccggcgtggggccgaatgtggcacgcacgaatatcgtttccacttcagtatggggtgtgctgagtttctcgctcaacggtgcggtgttcattcttctgggcatgcagctgccgcgcgccatgatggccagctggtctgacccgtatatcagcaatatcgcgctgatcggcattattctgctggtcactctggtggtaatcgcgcttcgattcttctggattgcggccatgctgcgcgttgcgcgagatacaatctccggccagcgccgcaaaatgacacccgaacgctggcgctcggccgcagtgatgacctttggcggccccaagggaaccatcacgctgtcattgatgttcaccatcccgtattacattgccggcggcgcgccgttcccgatgcgtgacgagctgattttcattgcgtcaggcgtgattatcgcgaccttgctgctggccaacttcctgttaccgctattggccccgaaccgtggcaaggatcccagcgcggaaataattccggtgaccatcgatgtgttacgcgccacggtggaggaattgaccggacgcatcacgccagagaatcgtcgtgcgattctgatggtaatcgaccagtacaccaagcgcatcgggcgattgcagcagcgcatcggcgataccgatccccagggattcgagcaattgcagatcgaagcgctgcattgggaaaaggaattcgtgcgcgaccggcttgccgacaccaaagcacatccggcggcggatacggccacgcaagagctgaacgtcgaaacctgcgagcgcatgcttgaccagattatgaatacgttgcgtcacacttccactgatccgacttcggggcacgcggtatcgcagattcgcggtcgtgtacgcatgttccagcggcagatgagcaattacgccaaacgcacggtgtccaagattcgccacaccacaccattggtgagcgaggaccagattttcgcgcgcacccgcgaactgcaggtcgaggcgattcatcatgttatcggccggcttattgacgagatgggccaggatacgtacaacaccgagcattgttcggcactgttgctggattatcgtcgtgccgaggcttcattgcaggcacgtccgaccatgagcggcactacggaaaccatcacgcaggtcgaggacgtaaagcgcgagagctacggtatcgaactcggtatgattcaggacatgtacgaagccggcgacatcaaccgagcccaagcccgctccctgaggcgcaacatctacgttatgcaagtggacgctgattccggcatctagtttccccggctcccttctctgaggggagccaagttggggattgctattcccgtgtgactttgagggctacccagatgctgcgaatcagcagaaccgtcagataggttgcgaagagtattccgccggcacgcgggctcatggccccggcaatccaagtgcccagcggtgcggtcagtgccgccacgatgccgataatcagaccggctttggcatgcaccattttgcggcgcacattggccacggtggtggtcatggcattcgggaacatggacaacagcgaagtaccacgcgcgatcaaatcggacgcgccaaacaggatcgacaaagccggcacgcaaatcgcgccgccgcccacacccagcaagccagccaaaataccggcgagcacgccgaaaacaatcatcagcaagacagtaaccagattaaattcgattgacgaatcacgcgaaggtataaaaataagctggctcgcgatgataaacgccataaacaccacgaacgcccagcgcagcacgacttccggcagtcgggacaacagcagcgaaccaatctgaccgccgatgaacatgcccaggaacatcagcagcgcagcaatccaatccacattgccttcaaccgcataggccagaacgccggacaccgaggtgggcacaatcgccaacatcgaagtggcggccgcatgccgctgggtcaggccgagccagaccagcgcgggcacgatgatggtgccgccgccaatgccgaacagtccggacaacagcccgaccagcacgcccaccacaaccataaccgcgatgccgcgcggggactcgtccacatgattctcttcagtatgtgcagtagtgcttgcagtgctcacttcgctcatgggagaacagtctatgaccgagtcagccacaagcgccctcgatgtccgattgctgcgacggccgcgccaattccagtgatggcggctgactacagcacgccagaggtaatgtcgttgtcaagtagccactggcgcaaatcggcgaactcctcaagactcacattgtgatccagaccgtggtagctcttggttttcagccacgtatgctcttccagccaagcggcggtggcgaacagttcgtattttgggattacgccatcgttcttgccgtacgtatagaacacggggatatcgtaatcggccaggcgagagtcggcgggggccgtgccgggcacctgaccgggtgcgttgaagccggacagggagacgacggcccgataccgctcgggattgatacgcaacaaatgcacggcgaccagcccaccttgcgaaaacccaagcggcaccacgtcacggtcggcgggaatgttgtcggccacccatcggtcgactgctgtggcggcggcatacgcgtcgtagtcacgatcatcgccgataggcagggcatcgtggaaccacgcgtagttgccggggtcgagactgccctcacgggccggcgcgagtgtcagcggcccgcgcaatgccacgaaatcgttatatggagcgatgaggcgcatgatgtccgccatgtcttcttcgctggatccccatccgtgcaggcacaggaacagcggatgcgcggcatgctggtcgaagccgccgcgcgaggtgacgctgtgctccacggtgagtggctcgccaaaacgtccgggcacagtggtggattcgcggccgatcagaggctggctggcattcgcttctttgctcataccattccaatatagaggtcttgcgcgctgtgcggaaaacgatggaccatgatttcaatcacattgggtaatccgcgccgaatcgccttgggacttttcaagggatactggcaatctgtcaggcgttaccgctgtctgcggtatctgcggctgcggtgattgtctcaagttcgccgccccactgctgctgcagtgcggtcatcttgctggcctcgccgaacaccatccagcgtttgccgttcagcaatcgccaatcacctttcgtttgctcattatcagcgtattggctcagcagttcggaaatcttgctttcgataggtgcccggctgatggctgcggacgattccgattcaaaggatacgaaggccactctcggatcagtgcacatctgtacggtggtgatgcccggcaaaccgcccgtatcaagcccctgccatccttctttgcacgcgccggcagcttgttcgatgccttgctccatctgtgcggtatcttcgacgggtgccttgtcgttcgactgctgaatcagtccttccgggaacaatacgcccacggccacgccgataaccaagcaaactatggcgcacaccagtgcgatgatgccgcccgcgcccactcccccgtgagtggcgtaccgaggcatggtgactcgcgcagcgatgaccagaatcagggtgatgccgataagcaccgccgccatcaacgcaatgtatcgtcctggcactgccgtcataaaggaaatggcgtaaggcgcgatctcatgaaccgccgaggtggccgataccacgacggctagcagtccgctgacaacggcaagtctgcggcacaatatcgacgttgggctgctggcttttgtagcggcgaatcgccgtccggcatcccgtctggatgggcgtcgattctgtgcacgacgtgagctgcgcgaatcgtcatactgaccatcgccgaagaaatcgtagtcctcatcgttgcgggccatcggtgccccctttcctgccgattacacagctagtgtaccgctatggcttgggaatggcggtcattcgggggaatgattcagggcacaaaaagaaccccggcggttgcccgccggggagagaaaggagagagaagaagaaagggggttcaattgtcgggaactgctgcggctcctgatcagctttccgctgacatcttttatataaccactgctttctgggtctacctctaagtttctctgagaaaaacctgagaatacttgcgattgatggaccgcggaagcgtgaggagcctctcacgtttccgcccaaggcgctagacttgaaggcagtatttatttgcccaaggagtttttcacatgctgctgtccgaccgcgacattctcgccgcacagtccgcaggtcatatctcacttgatccgtggacccccgaaatggtgcagcccgcttccatcgacgtgcgattggatcggtacttccgtttgttcaataaccacgcctacacctatgtcgatccggcggaaaaccaaggcgcgctcaccgaacagttcgaggtggctcccgacgaaccgtggattttgcaccccggcgagttcgcactgggttccacgtgggaatacgtcaagttggacccgtccattgccgcccgtctggaaggcaagagctcactgggccgattggggattctcacccattcgactgcgggcttcattgaccccggtttcgaggggcatattacgcttgagctgtctaatgtgtcgacgttgccggtcaaactatggcctggcatgaaaatcggccagatgtgcttcttccagctgagctcgcccgctgagcacccttatggctccaagggcaccggctcgcattatcagggccagcggggtccgacgccgagccgttcctacgagaatttctaccgcgcgcacatcgacgactgagcgttgcgacgtaccattcggccggcggatgccggccatttgcttaatcccaaggagatgtcatgaccaacagcgatggcgggttccagttcgacttccagcagcccgaaaagccggtcaggccaacggttcctccgattcccgggcaagagacggcagcatatagcacggaacccacggcacaagccacaccggctctgcagttcccgcagtctgtgcagtctgcgcagcccacacagcccacacagtttgtgcagcccgcgcaagtagcgtatgcctcacaacccacgcaagctgtgccgaccgtacaagccgctcagccgacgcagcccatcgatccggccatgacgcaaccgttctcgccgcaattcctagctgcggttgccgcacaagcaccacagccggcggcagccacgcagccagtagtatccgaaacaccaatcgccgctgcgcccggccagcagcaatacgtttgggatcagacgacgcaaagcttccgaccggtggaaccgacagcgccagtgacgccagcagcaccagccgcaccagcggcaccggcgacatcgcctgtttcggtagcttcaaacgccgcgacacaggcgttccaacccaatcaggccgagcagcctgcggtagatgccgaggcaacacaagcgttccagcctgatcaggtcatggcaacacagcctttcgaagctcaggccatgccgaatgccgaaaccgcggccacacaggcattccagcctgattcagctgcggccacacaggcatacggcgcatcatccaccgtatccggtgagaccgttgccatgccggcaacgcaagtagcgtctgccgatgatgctgcagccacacaggtgttccaaccggccgccctggccgcttcggcacaggctcagcctgctgtgatgcctccctccattccgttggatcaggtctccgatgaggacgattccgatggcaccgagcctcgtcacggcggtagcggcaaaaagaacacccgcaagatcgtcagcattgccgtagcagtagtcgccgtgatagcgctgattgtcgccggcctgctctggtggcattccaacagcagcaaggcgagccaagccgtggcattggccgagtgcaaggtagcggccaagcagtacacgaatgctcagaagaagctcaccaccgccatatccaatggccaaaccagcgcgcaaacatccaccagcgatgtggccgatgccaatacgctcaccacgctgaatcaggcgttgcaagacgccggcaatccggctgacaccgccaagtgcgattccagcctcaacgccactgagttgaagtctcacactaaagagctgcagaatgatgccagcgacatggctgacaagacggatgccatcaacaatgcgatcaaggccgttaatacttcaaaggcgacggccgataccaacacactgaaatcgaacctgagctcggctatttcgcaggcgcagggcacgctggataattccgcgggcagtgtggccgatgaaaacacccgcaccgcgctgcaaaacgccatcaccgaggccaatacggtgatgaacgggaccagtccgtccgaatccgacgtcaacaatgcgatttctaaactgcagaaggccgagtccgacgtcaccgcctcgatgcaggccaagcagcaggcagatgccgccaagcaagctcaggaagaggctcagcagaaggccgaccaagaggcacagcagaagtctcaagacgagtccaacaataacggcggcgacaactccacctctactgacggcaccgacggcagcaacaactgaggtctgcagcgttctcctgtttcccatggggcggttagcacattttcctttttcgcggaataatgccgttttcagcgaccgccccatgaggaaatcaccgccccatgggatagttaccgccccatgaggagccgtttggatatagcagtgggccgggctctgaataccagagcccggcccactgctatatgcccacaatcagggctattgcgatggcttaacgcttggccatcgcgcgtagcacaatcttgcgcagttcggaggcaatcagcacgattgcggccaggcagatgcattccacccaagccatcgggctcaatgccacggtgccgaacggaccgttgaggaacggcacgtaaatcaccacgagctgcagcgccacggacaaaccaatcgcaccccatagccacttgttggagaacagacccacgaatgcggactgcagatgcgaacgggaggacagcgcgttgaacagctgggcaaacaccagaatcgtgaagcccatcgtacgggcctcggtcatctgcgcttcatggccgatagcatccaccgagcggtcggtgaacaagccgccggacaggtgcatgtccataccaatcagcgtgacgatggccatgatgacgccgatgtagatgatgtcgccccacatggaggcgtcaatcacgcggtccgtcaccttacgcggtttacgacccatcacatcgtcggtctgcgggtccacgcccatagccaacgccggcgcggcatcggtcagcaggttaatccacagcaactgtgtggcgagcagcggcacggtgacgcccacggtttccggctggcggatgccgaggaagccggcaaacaccacaccgaggaacacggtgaacacctcacccacattggaactcagcaggtagcgcaggaacttgcggatgttgtcgaagatcacgcgaccctcgcgtacggcggccacgatggtggagaagttgtcgtccgccagaatcatcttggcgctctgcttggtcacttcggtgccggtgatgcccatggccacgccgatgtccgcggacttgactgccggggcatcgttcacaccgtcgccggtcatggccacgatgttgccttggcgctgcaaggattcgacgatcttgagcttgtgctcgggggccacgcgcgcgtacacggacacttcggacgtggccttgtcgagcgcggcctcatcgggcagctggtcgagctggtcgccggtcagggccttgccatccttggcgatgatgccaaggtcggaggcgatgcgggcggcggtcagcgggtggtcgccggtgatcatcaccgtgcggatgccggcacgatgggcctcggtcacggagtcgcgcacctcggtacgcggcggatcgataatgccgaccatgccattccagatgagatcggtttcaatggcttcggcctgatcggcgatgtcggacacctggcctgcagcattgacgcttacaccgggcacatcagccaaagaactggtttccagcggacggcaggcctcgccaagcgtacggtaggcctcggaggagagacgttcgacggtggcgagaatcgactggcgatcgccttcggtgagcttacggacctgaccacccacgcggatgcgcgtgcagtagctcaacagcacgtcgggcgcgcccttggcgaacacggtgagcttgtctgaatcggtgctgtccttggcgatgatggacatgcgcttgcgttcggaggtgaacggaatctcgccaacgcgcgtgtagcgcttgatcttgcgatcggccttgaccttgcatgcggccacgatcagcgagacttcggtggggtcgcccacaatctcccaacggccgttctcctcgcgtagttcgccgtcgttcgcgagcgtgccggccacgagcgtggcgacgacttcatcggccacaatctgggcctgctcggattcaggactgacgccgccggtcataaccatgcggccttccggcgcgtaaccggtgccggtgatctgcacttcgccggacggggtgaccacacgttccacggtcatctcgttgcgggtcagcgtaccggtcttatccgagcagatcacggaagcggatcccaaggtctccaccgaatgcagtttcttgacgatggcgttgtgcgcggccatacgctgcacaccaagcgccagcaccacggtcaggatggcggccaagccttccggcacggcggccacagccagcgagacagccaacagcaaggaatcaatcacgtcatggacgtcgttgaagccttccagcacggcgagcgccaccagcaccacgacagcgatgacgcacaccgcaatgccaaggatcttggagacgtaatccatctccttctgcagcggagttttctcatcttcggtggcggagagcatgtcggcgatcttgccgacctgcgtattcataccggtgccggtcacgattgcgcggccggtgccttgcgtcacggaagtgccgttgaagatcatgttggcgcggtcgcccagcgccttggcttcggtgagtgtgtccggcttcttgccaaccggcacggattcgccggtcagtgaagcctcggcaatgcgcaggctggccgcgttgaccagtcggccatcagcggagaccgaatcgccttccgcaaggacgatgatgtcgccggggaccacgtcggcggtgttgatgcgcatgaccttgccatcgcgcagcaccgaggtctgcggggccgtcatttgtgcgagcgcttcgacggccgcctcggccttggcttcttgcatatagccgagcacagcattgacaatcaggatcaagatgatcacgatggcgtcgaacggcagcacttcgccgccttccgcgccgggctgcgcattggctttttcgatgaaccaagcgatcaccgagataatagtggccgcgatcagcaggtagaccagcggatcttggaattgggccaggaatttcttccatttcggtacgggcggggcgctggcgagctcgttcgggccgaatttggccagtcggcgcttggcttcttcctcgctcaggccgtgggatgggtcgacgttcagggctttggccacgtcgtcggcgctggtcagacttggatcagtatcccccaatagcgcttcctgtgcgcgcacctcttccgattccacgaccccgttcgttgcggtcgtggacactgcggattgatctttgagatcatccataatgttctccttggtattgccgcggagtagtcagccttgcggccgctgccgggttttctctcccggctggacgcacaggactgcgcggttatggacaccggcgcaactgctgccgatgcatacgattgccattattccataaccgcgtggcgcacttggcgcacagcgtaatagcgttttgcctagaacaggcgacgcaaccaggcctcagccaaatcaggccaacactgcacgcattcgacgatgtgcgcatagaagccgttaccggcagtttccgcattggccaaggacaggccgtggctgccttcagggaacaggtgcgcctcaatgctcacgccggcggcccggcaggcctggatgagcattagcgtgttctccacgggcacggcgtcgtcggtcatggtatgccagacgaagacgggtggcgttttggcatcgatgtgcttttcgatggagaacttgtccagcaaagcctgattgtgagcttggtcccctagcaggcattggaagctgccgcgatgggcgtacttgccggcggtgattactgggtacgagagcatcagcgcgttcgggcgcacggcgtccgggtctatgccgccctgttcgcggatgtcttcgtcgccgaccgaggtggcgaggttggcggccagatgcccgcctgcggaaaagccgagtacggccacttgcgcggggtttacatgccactgatccgcattggcgcgaatcaggcgcattgcctcggcagcctccagcaaagccaccggatagcggctgggctgcaccgaatagcgcagcacgaatacggcgaagcctttggccaggaattgcagggccactggctcggcttcgcggtcagaagtcatggcgtagccgccgccaggcaaaatcaggatggccgggcgtatacggtccggttccatctcctcgctgttgtcggccacatagccaaagaatcgcgcctcgctgccatcaatgccaacgatggtttgttgaatgtattgcatgccatacatcatacgcgcagagaatagttctcgataagaaccactcgccatatgcggtcttgcccgtatctccaaaccgaataacacttacagcgaatcgtgaagactgcgggccatggcgcggtcgcgcgagcctttggtgagcttgagaccgagggtcacggcaatcaacacaacagtgcaggcgatccacagcgttcgaccgccgaagttgctgatagtccagccaccaatcagcggcgccagcgcaaccgacaccgaccacactacgttgtagacgccctgatacgtgccacgcgccgacgcgggtgccatggcggcaaccgtagtggtggcgatagggaatgtgcccagctcacccagcgtccacagcactacggcaagcgcgaatccgccccaagaatgggccgcggcctgcaccgcatagccgatgacggttacggcgaggcccatcaccagcacgcgtgaattgcccatgcgcgcgaacagtttcatcgcgggaatctgtagcaggcacaacataccgccattgatggtgagcagcaccgaatactcgcccagccctagaccaaggtccgtcatggcaatgggcaggccggaggtgctttggaagtacacaaggaagtagccgaacatcagcagggagaagccgaggaatggagtatcggtgagcacgcgccgccaattgcgagacatggcgcccttgacactggcagccggtgcggcatccgagtgattcggcctctcaatgccggcgaattccgcatgggtaacactgcattcgtcttcatggcgcaccgcacttggcaccgatacagtaatccccaaatgccgcacctcgcggaagaacgcaatcagcaatatcgtgacggctatcatcaccgccgcttcaacgtagaacatcagcgaatacgagatcttgaccagctggttggccacaatcggtccaatcgcgtacccaaaattaatcgcccacgattgcagtacgtatgcacgttgctgacgttcggcaggcaccacatccgcgatatacgcggcgatggccgggctgggcagcgaggcgaacgcaccatagacgaacagagccgcgcctaaagacacaggatcagtgagtacggaaacgaccagcagggcagccgctgcgccgatttcgccgatgataatcatggattggcggccgaatctgtcggacaaggtaccgccgaacaggcagccgatgattgcgccgaagccgtacatggccacgactgtgcccaccacaccctcatcgaggcgcagcgcggaaaccaaatatatcgacaagaatgaggtcacgaagcgacccatccacagaatcagaatcgccaaccataatccccaatacagcagggacagtccgaatatcatacgctgcttcttcactctcaataccttaccggctaccgacggcggaatagccgcgttttggcgcggggtgctgggacaatagcacctatggctatcaaaaaaggaccgaccaaggggtcgggtggcaagcatcgcaacaaactgaagggctacggccccactcccaaggccgaggaccgcgtctatcacaaggcgtacaaggccaagaaagcggccgaacgtcggcagatggccgacccgcgtctggcagcccgccgtcgagtggacaagttcgcttcggcggatacttcggatctggtgtacggccgtaattccgtgctggaagcactgcgcgtaggcgtaccttcttccacgctgtacatcatgtctcgtattgaacatgacgatcgtactcgcgaaatcgtgaaaatcgctggtatgaacggcctgcacatgctggaggccgatcgtctggagatggatcgtatcgcccgctctggcaaccatcagggcgtgattctgaaggtcgatccgttccagtactcctcgctgaacgagctggccgatcgtgctgagaagaaggccaaggcaatggaggccgcgaattcggcggccgcccgtattgctgcgcgaccgctgtttatcgcattggacggcgtgaccgatccgcagaacctgggtgccgtgattcgttcggcggccgcattcggtgccaatggtgtgattctgccggaacgccgttccgcttcagtgaacgccgccgcttggaaggtgtctgccggtgcggccgcgcatatgccggtggcgcgcgtggtgaacctgactaaggcacttgagggcttgaaggagcgtggatactacgttgtcggccttgacggtggcggcgataagctcgtcggcgagactggctttgaatccgatccgctcgttgtagtgctcggttcggaaggcagcggtttgggccgactggtgcgcgaaacctgcgacgcgattgccggcatcccgatcagctcgtctgttgagtcgctgaacgcttcagtggcggcgggtatcagcctgtacgcggtgtccaacgcacggcgcaaggctgcggcggagtgattgtcgcttgaggccgtaataggttgtacatacacggaagcccctctatttgaggggcttctttgtgtgatgggctcacctacagacagtccaccggattgtccgcttaatgactccacactgccgcatccggatcgtcatcggggttgtagccgtcgtcgtccgggtcgctgtaggtggattcgtcgtcaatgacgccggaatcggcctcttcgttaagttcggcgagtgccttggagtcaaggctgtagctcggcagagcgttgtcgatgtagctggtcacggcctcgcccatcggcacgtcgtggccggccttctccgccaggaaccagcgatggtcaagcacctcatggaagaactgagcaggctcgatctgggagcgatattcgcgcggaatcatacgcacggtcggctcgaacacctcacgcatccagtcggtggccacgatttccagatcctcgccctcacgccacgtggaggcacggtaggcgtcaaggtcgttgagcagacgacgggcctggttctcctgcacgtcaaggccggtgaggcgcagcagcttgcggttggcatagccggcgtccaccacgcgcgggcggaccagcacacgcttgccatcctcggcggtcttcatttccagctcgtccacgtcgaagcccagatcgttgagcttgttgacgcgctgctcgatcttccacatttcgtccgggttgaacttgtcggtgtcggtcagggcgctccacagcgagtggtagcggtcgactaggcggttgcccacctcgatctcatccacgtcgccgggcagtagcttgccggacgccaaatccataagttcgccgatgatgttggtgcgggccaagtcgatatcgtattcgcgctggccgtcggtgagctgggcttgcaggtcaccggtctcggcgtccaccaggaaggcggagaaagcgtcggcgtcgcgcaggaacaggacgttcgacagggacacatcgccccagtagaagccggccaggtgcaggcgcaccagcagcacggcgagggcgtcaatcagtcgttcggcggtgtccgggcgcaggttgcgggcgaacaacgcacggtacggcagcgagaacttcaagtgccgggtgaccagaatcgcctccagcggctccccttcacgggtgtgacggccgatgaccacggcgatcggggtcacagttggcagttcgagcttctgcagtcgacgcaggatctcgtactctcgctcggccacctggcgcgtgatctccttcatggcgtacacctcgtcgcccacgtgcacgaatcgcacgacgtggcgggagatgcctcgcggcaggttggccagcaggtccttaggccaggtcgccaagggcttgtgccagggcagcgtgaacatctttgggttcgagctggcggcggtgattttcagtgcttgcggttcggctgaattggcgtgttcgtcttcggctttgacagacgtggccttcagcgcacgcggatccatctggggcaattcgttcaactccatgtgttcgattttacgtgtcgttcgcgatgtgtgctcctttgccacgacttcggcgcgttatgtttacggacgattcaactcgtcccatgccgctcattgcatatcgttggacttggtttgctgtgcaagctgcaaacgcagctcatcgatctgccgctgcaggctctcgatataacgtgtttgcttgcagatgatcagatcgcgcacgtcacgcacatcgaccttgctgacttctctgtcttgcgccgtgtccatatccacagaaaacaggcgttccgggctgcttgccacttccagatcttccagctgcattttcttccgccatcggtccatgcagcgttcaatacgtttttcgcctatgaactcaggccctagtcccgcctcacggaacaggtacgtgggcgattcgccggcatcggcgcgcatcacgcattcccgtttgaaccactcggcatacctgatgcgtgatggcgataccttcaccaccgcccgcagcttgatcagacgttttatctgtgcggatgagaacgaggccttgctatgcgtcatgcttttcctccgtcggcacggaactggtgtgatgactcggtatcatcggagcgatatcgcacgcgtagtttcaacacggcaaatgcgatgacaagtatgacggccgcaacaccggcgatgcctcccacggcggcaccggtattgccgataacgccaggattgcccggcatctctcctgggttgtgttcgtgttcaggcggggtgggcggagtactggtgctgaatttcggctctaccgtgatgttgagatcggcggccgtatctccgctgccgggaatcgagatgaggaacggatcacagtcgtatgccttgttggctttcgccgaatccgtgcgggagaccagatataggccaagcggtaggttctggaaagtaagttggccagctgcattggtggtgccggaatgctggtatagcttgtttttcgccgcgtgtgcagccagcttcttggcggcatcgtgatattcgctcgatgtcaggcgttcccaatcggcagtgagaccggaaaaatcactgacggttttatatgaggaaacgctaccgttgctgttcgttgtgacggtagcgacgcgcacgatggcgtaggtatcgccggcaagtgatttgggtgaagccgcgtctcggttccacacggcattgatggtgagagtgccgaaggaatcagcttgcgcgtatggcaccatgaagccgaaagacacaagaccagtgaggatgatagtaatggtggcggcaatcatggcagcaatgcgcgccgcaccatactcgcttccgctatgcgggtctaacatgtctgcccggtcctttccgccgtgatgaatgtgattggttatttgtattggctggctgaggaggcaagtcaccgtccggctcgatggctgtggagctagaatcaccggatgcgaccttggcgctcccactctgccggcgtcgccgctcatgccgctgccacaaatgccatgcaataagcaaggcaatcagcgcgagagacggcaacaaatactgcagcggaatgtccacgtggaatgtggatttggcgtcattctgctgctgtggtgtgtatggaatacgatgaccgcgcaccagcagccgatgcgtgttgaccgcatacggtgtgcaggtaatgagcgtgaccaaatccttgccgggctcaatcgccagttgtttggcatcagtcggcagaacggtagtgatcttatcgacctgatacgcatacgtgtctttaagtattgtgatatagaacttgtcgccttttttcataaggttcaagtccgtgaacagttttgccgtgggcaaccctcggtggccagacagcgccgcatgagtggacgcgccaccaactggtagtgaggtctgttccaagtgaccgatgccggattgcagtactttctcggaagtgccgtgataaataggcagggtctccttgagcttaggcacagtgacgtatcccatcatgccgtcgccggcgaggttgaggagcttcatgtactcggcgtcggtggcttcggtgttcaccgctccggtgagggcgctggtggtgccggagctttcctcggcgagtctggtgttgtaggcgtgcgcggcgtcgatcatgctgcggtattcctcgtcggagagtgcctcgacggccgcgtcgtagttgctgacgacgcgcgaggcgttcttcatgacgaggaagttgctgatcgtcgggtagaacaggacgagcagtccgatcacgatgaccagcaacggcgcgaggccgcgcagcttcttaaccatggatctccttggtggggcttccccggtcagggaaggccggcgccccggtccccttgacgcgggtcaggggaaccgggggtcagtggcggtctcaggccgcgtgacgggacttgcggttggacttgacgtaccaggtcgcgccgagggccacgatggccacgccgaacacggtgaacagcacggtgcccatgccgccggtctcggggagggtgacgcccttgttgttctcgacggtgatgaccgggacggtggtgccctgcgcgttggcgttgtttaccttccaggactccaggatgccggtgttctcgtcgtacgtggcggagatggtgaccgtgatcggatccttcagcaggttatagcctgtcggagccttgatctccttcaccttgtaggtgccttccttgagaccggtgaactgcagcttgccgttattgtcggtgaccacagtcttgtcatcggcgacggtttccgttcccttggccgggcggaacacaccatcggagaccttcacaagattgatcttggtgccgttctcgcgctgcagttcgaactgggcgcccttcagcttatcgttgtggtcgaccgcgttgaccttctcgatgtcgaagttgaaggtgtaggtgtaggtcttgtcttccttggtggtgccggtgccgttagaggccgggtcgttgctgtactcgatcttcgcgtcgttctggttgccggtggaaccgacctcggcgtccttgttcagggtggcggagtactcgacggtgatggccttgccggcgtcattctggtgcagattcttgaagttcatcatgttgacttcaagagcggtcttaccagtatcggagtccgtggtgtacgtagcggtgtagtcgaggtccttggtcagcgtggtatcgccgatcttgacggtcggagcgaacgtgccgccctcggcggtgccgttcagagtaaggcccttggacagggtatcggtgaacttgaaagtgtagccgttggtgtactcggtcatgtccggcacggtggaggcgagcttgaagtccacggtgtcgccgatctcgacgctgttgtgcttcttgtcgtcggtgccgttcttgacggtcttctggatggtcgggtaggtgctcttgaggtcctgctcgacggcggtgctgttcagcacattgagcaggatggcatcggtgccacgcttgtcactggtatcggtggaaccggccttcgggctgacgaggtaggaaccgtaggccagatcggtgaacgtcgccgtgtacttaccgtccacggcaatcttggccgcgctctcggtcttaatggtcaggccggtctgggtcttcgcccaatcggaggccttcttggcgaacgggacgacctgggtcttcccgtccttgaggccggagacgtagtcataggccctttgggcgacgttgtcgacggtggtgtcatcgccaaggttgaactcagtcttgttcgagatgaagaactggttccactcggagttcagcgtgaagccgccgttgtcggcggttccggcgttgacggcatccagatcgtaggagaacatctggtaggccttgatttccttgccggcgaactcggcgttggtgctgctcaccttgatgctgccgttggcttcctgagcgttggcggtggtggcgccgaggccggcgatgccgagcatcgtggcggctgcgaggacgcccgccgctacattcctgattagtgacttcatcactgttcctttctctgtactgcaccggtcccggtcggggccggttcgagttggttacattggttgccccgccgccgtgcgacggcgggaagtctggttatcgggtgtgccgaccgcgtttgcggccgaccggcaatgcggttcccgcgcccgctcccccggccgcggccggttccatgcggttggcgcgcaggtaccatgcggtgccgagggcgagcatgaacacgccgagcatgacgaacaggagcgtgccgttgccgccggtctcgggcaggggcgagaagttcgtgacggtggccacatacttgccgtccttgtccgttccgtacttgacggacaccgagtaaccggcctcggctggggtcttcgtctcagcgttgccatccgtgtcgccggaggcgtaggtcatgttgagctccttgacggtgtacgtgtagtagcgcgtcacgtcctcgccgttcgggccggaacccttgtcgacgaaggcgaccggcaggccggtgagcttcgtgcgccacgtgtcgctccacgcggagccgttctccttggcggtcatggtcaccgtgaacgggttggcccgctcctcggtggcgcagtcgtccttgaagcattcgagcttcccggccttgacctgttcgcccgccgcattcgtgtacgtggcggtcacctcgagggcgatggcgtcggggcgttccagctggccgttgcgccacactttctgcagggtgaggtccacggtcttgcaaccgtccttgccgcacgggtcctggccgtcgtccggttcgggggtgagtccgccgttgttgtcggatacgggcacgtcaagcatgagcactgccttggccggggactggtaggcatcgagcttcgtctggccgtccttggattcggccacggcatccttgatgccaacccatgtggtaccagcgtcgccggatgcaccactgtgcacagcgccgctgtcgtatgtgttgaccacgtcgaacagcttcacttcccaacgatcgagtccggtgttcagcgcatcgtctgccgtgttcttctgcgagaagatcttgttgccgtcctgtgcggaggtgcgggcctcaccggcgttcgcggccgccttgcggtagatgcgataggtgttgtatgccttgccgccgttgccttcatcgaccggtccgaggatgtcgctcatggtgttgaagtcccatacggacttgagtttggtgttcgagaacgggtcgaccagtccgctggtgccgcggatcgtgtcggcgtagaccatgtggtcgtctgccagcacgccctcgtcgttcagtccggcgaaaccgcccgcgtagcctgtggaaaggtctttcatgccgtcggtatcctgagtcgctccaccaccgaacacgtcatagccgctggcgatgcccgtcacggtggactgttccacgcgggtgcggttgcccttgatgagttggacggtcaggttgctacctgacccatccatgtcgatgccgtccttgctgcagggcagtttgatgacgctgtcgccgatggtgacgatcgccacgtcggtctgctgctggttttcggcgtcggccttggacagggcgacgctcaccttcagcccgaacaggttcacgtacagcacatcgccttccgagagcaccttgaggtcgaataccttgccgaagatagtcgggaaccacttgcccaagtcgatgacgccgacctgctgcgccttgtcgaggtataggagcttgaccagcgcgttcactacttgcaggagcagttccacgagtaccgagttgacctgcgtatcgaccagataggcgcggctggtttcgccgacgaatccgccggcgatctcgccgctggtgaccttcttgagattgccggccgtgcagcccttcactcgggccaggtccgcgtagccgacgaatccgcccgcgacctcgcgcccggtggccttgtcggtggctttgccgtaatcgtcgccatggtgtgtggcggtgacggtgtagccgtccgggatgccggtgacatgcgaatcaccgacatgcgagccccagatgtcaagtacgccggccgtggcaccgagcaggttgagcgcactcgtgccgagttgtgcgttgtcggcggcgaccgtgccggatttgccaagatgcccgatgaagccgcccacgtagttcacgccggtcacactgttgaggttggtgaccgtggactgcttgacggagccgttgatcagtccaccgccgaagccgccggccgcaccggtgtaacgcttcgagtcaagcatgccctttgtggtggagtcgtgggcgacaatctggatgccgtcgctcacgccgttgacctgaccgtcgtagatgaaggtgcggaacgcttcgagcacacccacgttgccgaccttgagcagtttgagcagaaggttggtgttctggtccttgccagcttcgccgccaccaacggaggcgacgctggacacatcggcaaggccgaagaagccgcccgcgtattgcccgccttcaacggcgcgcaacccggtgactgtaagtgcggctgggtcattgttcggatccgcttcactgccggtgcctttggcggagtccttgtcaccgaggatcgcggcctgcagcgagccggcgaaaccgccggcgttcagggcatacttggttgtggtattacccttaccgtctttgctctcatatgcgccgttgaccgtgtatccccatgccgggtcatccgagctcacatgcgcaccgcgaatcgtcgtaaccgtggcctgcaatacgctgaccagacttgccgggttcgataccagcgagtcgaggattccttgtaggaatccctcggatgcgttggtgtccacatccgcgaccgcgccggcagtggccacgccgatgaatccgccgacgttgttgcgtccttccaccttgcgcaggttggagacgttggcaccggcagcggtgacaccatcagcaagcttctggccgttctggtcgagatcgccccagatctggccgccgaccgcgagacccacgtagccgccggcgttgccggtgccgtgcgtgatgtcttcgccggcggccgtgattttcatacccttgcggtagccggccacgctcgaggatttgatgacaggcacgaatacctgtgccacgtcgagcatctgacccagatcaagtttgatgcctttgtctccgaatagttggatggagccgaacgaggatgccgagccggattccatcgtgcccgcgtagccgcctgccgcgcgcatggcggagacggtcttgacatccatcgactggccgtcggtgatcgtaccggtgcgcatcaggccgacgtgtccgccggcgacgccggaatcatgcaggttcgcgccagtccgatactccgcacgaccggcgacgacgttgaatccgaagatgtaggattcgaggaacttatccaaggactcctggtcggtaacggaacccgcaccgtcgcccgtagctacctcggtgaattccttgccatacgcaccgtacttgccgatattatcgacccaggtcttccactggtcatagctcatattgcgcagcggaccggtgaccttcgtgtgctcctcagtcggatagaccacggacagcacgccggcgaggttgccggccttgatgagaccgccgagcaaggagagcgaaccgccttcagcggtatcggccgcgtccatgaagccggtgtagccgccggcgatttcggcaccgtatacgctgcggatgcgcgcggcataggctacgcgttgcggcccgttgtatttgccgtcggtgttctcctgcttccatgctgcggtgttgttgccccagatatggccgccgcggttacgacctgcatagccgccggccatgccgcggcgtgtggttgtatccgatgccgcctgtgcgcgcaccgcgccgccgcacactgcggcatcggttgagctgttgcgaatcgtcggcacgaagtcctgcacgagcgagagcaggttgtcgaggttgacgagcttcttgagcacgctgccgtcgccgagtacgttcgccacggctcccggctgcatggtgcccacgtagccgccggccgatacctggccgatgatgtacacgaactcgtgcgagctggagtcctggatatggccgccttcgatgtctccggcgaagccgccggccatgcccagtggatcgggcttgttgttggcgttcctatggtctgcggtgctggccagcacggagtatccgccgatgccgccggtcacgtcggagtgctcgatggtcgaaacgacaatgttgagcacatccagcacgtcgttgagattgacgttctggccgagcaggctcaggccgccgcccacggctgctgccgagccgatatccattttgccgatatagccaccggcataccgcgcggcagtgactgcatacgagctgtctttgctcagataggtgtcgtcgattgatccggtggtttccagattcttcggtgccttgacatcggtgtggcgcagttgagtgacactggaatgggacacctgcacaccggaaccgtagccgatgtagccgccggcggaaccggattgcgtatcggattggtcaagtcgggtggcggagacggtgaagccgggatcatccgggtcggaaatcttgttgccgctggtggtctccacggtggtggcatcggaatgcacacctgcgtaggagatgaacggcacatagccctgcaccacctgcagcaggttggcgagatccaccgtaccgaatttgccgagcagactcagaccgccgttaccagccgaagcgagtgcgccggaaacgaccttgccgccgaaaccgcccgcgtatgcgccgccggtcacatggtcgaggttgacaacagccacggggttggcttggacgcgggactgcacgtctgccagtgttgggtcgttctcgagatctttcttatcgaactgattgactttgccgctttggaaattgccggcgtagcctcccgcgatatcaccttcgacgtaaccaccgttgacatacgacacagtggtatccgtatagcttggaatcagatacggcatggcaccgagcaggtcgttcacggacagcagtccgcccttgatgaggttgtccaatacgctggaatcatcggcgttgctaagtgcgtcggcgaggccgccggtggtggagaagcccacgaagccacccgctatgccatcggatgtgctggtatcggccgtgaccgacttgaggttcgtcacatggctttcgcgggtcttggtgctgttggcctggccgtagaagccgcccgcagcgtaatcggtggtctcgttgttctcgttcttgccggtcgccttgaccgtgaatccgttggcgatgccgttcacattcgatgcagtgactgcaaccgaagaatattgggcaaccgatagcagaccggatagcttgataagcccaagcacattaaggccgccggcgccaacggcgtcgcccggtccggagaagccgatgaaaccgccggcttctcccttggccgtgaccgtggccagattagtgaggttggtgttggtcacgtcaccaccggtggcgcatccgatggcaccgcccgcatagtatgagccagccgtcactgtcaagccggatgccggggcagcaacagtcacgttctccacggtgaacggggcaaactggtcgaacttcttgagcgtggcgatatcgccaattttcaccacactgttgagcaacccagccactgtggtcggttgcagattgccggcgatgccgcccgcgtaggagccgccggcgctgactgattcaagaccgttgatggcagtggagcgctgctgagggagcccacggggattgttgtatttccagaacgtgaggttctgcagatgatcctgcgaggagtcgccgatcaccgtgcccgatccttctcccacgagaccgcccgcgtaatcgccaccagccttaacggtgaaggagcccttcatctgcgtgccgagaatcacggagggattcacgccaacgatggacagcagttctcccgcaccactaccgctgccgctcagcagcttggccacagccttggtgagttgtttcagcagcgatgcgttcgtggcatcatccgtgccgagttctaggccccatcccacggaggcaaatccggtgaatcctccggcgtgggatttgtcagtagacacggcagccgtggctgaaatcgtattattgaccgcgtaggcattggccatcgcgccgctaaatccaccggcatagtccgtggcagatacagtgaccttgccatcgccgtcgacggtcaggttgctgttctcgatgaggctctgcggacgcagtgcagacagcaaatcaataccaagcgagttgagcagaccacctacattgccattgcggcttattccggcgaagccaccggcgtattgcgttgcccgcacggtgaaaccgttcgtgctcgtcaccgaggagttctcgatgattgcgccaatctgtgcaccgacgaagccgccggcttgcggattattcttgttgccgatcaccacgttctttttgaacccgttcaccgaactgttcgagatgaccgggttgtagtagccgaccggaatcaaggcattcagtccgagcgtgccggacagcaaccagttcaccaaatcgcccagcccgaggaatgggatgacacccaagatcttcgagagtacattggtgagcgttcccacgatgccggagaccgcatcgtatcgggttgcgccctcaacatatcccacgaaaccaccggtcatacggcttacgctggataccgaaacatccgccacttcacaatccgtgaccttggcatcgccgtaaatacggccggcgaacgcacccgtggcgagattggaaggattgtctttgtgcagggtgagcagaccttgaagattgaggtcaagatttacttgtccgaatgtcagcagtttcaacgccttaagcagaagatccaaaagtccacccactgccgaagtgagtgtgccgagcagtgtcggcggaatatatgacttgcttgcctgattcgtcacagacacgtcctgcagcttgaggttcgacaccacggccgtaccggcgctgcccagactggtgttgttcatcacggtcttgttcgtgatcgaggcgaagaagccgatgccctgctgcttgctgacgtccagctgcttgccctgttgattgacgaccacatggctgatgaccggccgagctgctgtggtatgctccacgcttgcgccatccgcgccgacagccttccacaggctagccacagcgtctgcgctgttggagaccgcgccgagcatggtgccggagaacatgagcggagtccactcagtactggcggtatccgccgcgttcttggacaaatcgatgtcacggaagatcagataattcgcatcggccgaatatgtcagaccagtgttggcggcagagtagtccgcttgcgtaccatcagcacccacgccgtaatacctggtgcgggtcttatcagcgtccactttcgtatgacatatcgccagcgaattgtcatagtcggaggcatcagcattgcgcaaggtatccgaatcggcaagatcggcgtcaccggcgtattcagtggacgacgcgccatctacccagtggtagccaaagagtccttgcccggtgcaggtctgcgtgaccttgttgatacggccaataaccttcttgccggaaccaatcgcacgcagctgctgctcgttgccgatcaggatgtaggtcttgccgttgatctccttgatgacctgaccttcaaagtcacggccgccaagcgccgtcgcggcgacctgcacattggccttcgccggcgattgatccgcctcagtcgaagaatcgttcttggcaccttgagaagaagtatcagtcggagcctgcgtttgggttccgtcattagcggaatcgccagcagcagcccctgctgcggcatccgccttgttgcctgcctcaccatttgaggattcggaagaaccaccggtagtggaagatgaagaagatgaatcttgctggacttcctgattcgtttcagaaggtgctggcgcaccgtttgatgtattggcctcttctgacgtcttatcgtcaacattgacattgcgagcagaaggagcagctacgacagtattatccccccccccaagaattacggagttagaggaaccatttacatcatctacgtcctgggcatatgccgcaggcaccatgcacacgatggacaaggaaacagcaacaaccgaagcaaggcagcgccgcaagacatgacgatgctgtccaggttcctgttctacccctccgttaaacctgcaacggccgagctttaacttcgagcccatcatctcccctcatagattcgcaatccccttttcggggggatactgcatacaaccatacccccttcctaggaaaaagttgacgagaaactagaaaatgttcatttgcgaggtcagttagcgtacgttttctaggcaaaaagaaaagccccgcagctatgcagggcttttccaacgaggtcataagagaggaagagaataacctcgtttaatggttgacgaagcgattagacctcgccaagtatctattagttcagacgcagctcagtcgacggagcgaacaggtgcatcttggccgggtcgatcttgatcttgacggtcgcgccaaccttcggcagcgcacgcggattcacacgaatcgtggtgagcttgttctggtcggacatgacctgggaagcctcagcggcggagccatcggtgatgatgttgccgtagatgtagccatcggagcccagatcctcgacgttcacaaccttcagggagaaggcgttcgggtcgtcagccggggccaggccagcgtcctcaggacggaagccgaccacgatctggccgttgtcttcggcggtgagcttgttgacggcctcagccggcaggtccacggtgtcctcaccgatcttcgccttgccgttgaccaccgggtgggtgttcaggttcatcgacggggagccgatgaagccggcgacgaagacgttggccgggcgatcgtacagctcggtcggggcgccgacctgctgcaggataccgagcttgatgacggcgatgcgatcgcccatcgtcagggcctcggtctgatcgtgggtcacgtacagggtggtgacacccagctggcgctgcagagcagcgatctgggtacgggtctggacacggagcttggcgtcgaggttggacagcggctcatccatgaggaagaccttcggctcacggacgattgcacgacccatggccacacgctgacgctgaccaccggacagagccttcggcttgcggtcgaggtactcggtcaggtcgagaatctcagcggccttctcgacgcgcttgcgaatctcgtccttcggagtgccggcgatcttcagggcgaagcccatgttgtcggcaacggtcatgtgcgggtacagagcgtagttctggaacaccattgcgatgtcgcggtccttcggctgcatcgtggtgacatccttgccaccgatgaggatgcggcccttgttgacctcttccaggccggcgagcatacgaagggtcgtagacttaccacagccagaagggccgacgaggacgaggaactcgccatccttgatatcaagattcagatcatccacggagggcttatcgttgcccgggtagatacgagtgacgtggtcgaaaacgacttctgccataattactaatcctttcagaggcaggtacgtgcctcacgatccgttgtaaagggatttgttctttactgtgcttccaccctcgccaccgacgtacaactttgctttcggaaactgcaagcttcagcgtttacttttttccggttcagtgaaggttctcttcgttgagccgagaactactatacacggaccgtggaccaaggcaagtggcgtgtctgaaatgtagttaactttatgggcgtttctgggggtgttgtgtggttcggcccatgacacgcctgtttctcgaacgtgcgaaccggcacgcccgacgtagagcaggtctgctcttcccggactgatggattccatcagtcgccgactaatgcgacacagactcgaaggtgacgccgttgcgggcggctttgcgctcggccttgcgctcctcggcgtcttcgatgcgctggatgcgcagctggcgccagtcctcgcgcatgtcgcggaaacggtcggccagcgttacgtcatcgttctcggcatcgccatcagtactgctgccatcggccttaccgaacgtgccatcggccaccttggtgatgcccagcttgagcagtccgagcaactcacgcaacgtttccggtacgggctcatcgccctcatcggcggacttggtcaggccctcgatgcggcgacgaagcgcgtcggcgtcctcgggatcgatcttgagcccggcgatcagcgactggcgcatggtctcgtaatcgaggttggcaaaaaaattcagctgttgcagcgtcatgaagcccttgagctcgggaaatcggtggacgatgtattcctcgcggtcgtcggcggcgcgggtccagtcgcgggtgagctgcggatcccagttggcggtaatcgatccctcgcgcatgcggtagtggtacagcgccttgggcagacggaccacgcgcgtggcctcgccgatcacgttgcagatacgggagagatcctcgattttgcgccccaccgggaaggagaatccggtgccctgataggtggaggcgggtgccaggaaggcccagaaatagccgtcaatctcagccttgacttgctttttgatgacctcgaccggggtcaggacctgcacctcggtgaagtcgttgtggcgatagttggacagcagcggcttgttgttctcggagatggtgtcgaactggaacatcacgaggtcggcgtcatactcgcgcatggcgttcagacagtcctccaccaacgtgggtgccacggtgtcgtcggaatcggcgaagtatatgtacgcgccgatagcctcagcgataccggcgttgcgggcgtcggacaggccgccgttgggcttgtgaatcacgcgtatgcgcgggtcgcgggcggcccaggcgtcgcacatggccgggcaattgtcaggcgagccgtcgtcgaccagcagaatctccagattggcgtacgtctgcgcggcaacagacgccacgcattcgtcgaggaacttctcgaccttatataccggaataatgatgctgaccaacggatcctgttccatatctccagcgtaacgccgccgcacgaacgcggcggcgctgcgggttcgcggaccgcgaaacccttagaagtcccagtcgtcgtcatcggtttcttcggctttgcccatcacgtaggaggagccggagccggagaagaagtcgtggttttcgtcggcgttcgggctcagggcggccaggatcgcggggttcacatcgcaaatctcagccgggaacaaagccgggtaaccgaggttcatcagcgccttgttgccgttgtagcgcaggaacttctcgacgtcatcggtcaggcccacgcgatcgtacagcgactgggtgtactccacctcgttgtcgtacagctcgttgagcaggtcgtacgtgtagtcctgcagatccaggcgctcggcatcgctcagctgggcgatgcccttctggtacttgtagccgatgtagtagccgtggacggcctcatcgcggataatcagacgaatcacgtcggcggtgttcgtcagcttggcgtgcgcggagaagtacatcggcagatagaagccggagtagaagaggaacgattcgagcagggtggaggccaccttgcgcttgtacgggttgtcgccctcgtaatagtcgagcacgatctccgccttcttctgcaggaactcattgttctcgctccagtcgaatgcggcatcgatctgctcggtggagcacagggtggagaagatggacgagtagcttttggcgtgcacggattccatgaaggcgatgttggtgtacacggcctcctcgtgcggggtgagcgcgtccggaatcagggagacggcgccgaccgtgccctggatggtgtcaagcagggtcaggccggtgaagacgcgcatggtgagcgtgtgctcgtcctcggtcatcttctgccagctggggatgtcgttggagacgggaactttttcgggcagccagaagttgccggtcaggcggtcccagacctcaaggtctttctcgtcttcgagtcggttccagttgattgcggagacgcggtcgatgagtttcagcggtttgcgcggaatggaaatcggtgccatggggattcctttgcattactcgtcttgggagttgtcggcgggcttgttttcaaactcctccggcgcggtcagccggagcagtgccttataaatcattggtgacattgcaggttccttagagtggcctctggttgttcgatgtgtgcggagaccgccgtctgaggccgaaggcgtacgaaggtacgtcgagtgccgaagaaaggcggtatacgctccatcgaacgatcagagcatgcagctgacgcagccttggacctcagtgccttccagagcttgctggcggatgcggatgtagtagagggttttgatgcccttgcgccaagcgtagatctgagccttgttgaggtcgcgggtggtggcggtgtccgggaagaacagcgtcagcgacagtccctgatccacgtgctgggtggcctcggcgtacgtgtcgacgatggccttccagccgatctcgtaggcgtccttgtagtacccgaggttgtcgttggtcatgtaggcggccgggtagtacacgcgcccgatcttgccttccttgcgaatctcgatcttggaggcgatcgggtgaatcgagctcgtggaatggttgatgtacgagatcgagccggtgggcggcacggcctgcaggttctggttgtagatgccgtccttcagaatcgcgtcgcgcagggcctcccagtcggccgcagtcgggatcgcgatgccgtactgttcgaacagcgcacggacccgttcggtgcgcggagtgagcgaacgacgaccatcggtgtacttgtcgaagtagttgccctggccggccgggtgggcgtagtcgctcgtagcgaagctggcgaacgcgcggccatgctccacggcgagcgcgtgcgaggcacggtaggcgtggtaggccacggtcatgaagtacatgtcggtgaagtcgaggccctcttcagaaccgtactggatgccttcgcgggccaggaagccgtgcaggttcatctggccgaggccgatggcgtggccctcctcattggcgcggcgaatcgagggcaccgcgttgatgctggtgtgctcggccaccgaggtgagtgcgcggatcgccgtctccaccgtgtgggccaagccgccatccatcgtcttggcgatgttgagcgaacccagattgcaggagatgtcgcggccgacatgcgcatacgtgaggtcctcgttgtatgcgctcggctcctgcacctgcaggatttcagagcacaggttggacatggtcacgcggccttcgatcgggttcgcgcggttgaccgtgtcctcgaacacgatgtacgggtagccggattcgaactgcagttcggcgatggtggtgaagaacttacgggcgtcgatgtaggtcttcttgatgcggtcgtcggccaccatctcgtcataatgctcggtaacggagatgtcggcgaacggcttgccgtacacgcgctccacgtcgtacgggctgaacagggccatctgggccttctgcttggccagttcgaacgtgatgtccggaatcaccacgccaagagccagcgacttgatgcggatcttctcgtccgcgttctctcgcttggtatccaggaagcgcaggatatcagggtggtgggcgttgaggtacaccgcgcccgcgccctgacgtgcgccgagctggttggcataggagaaggagtcctccagcagcttcatgaccggaatcacgccgctggactggttctcgatgtgcttgatcggggcgccgagctcgcgcaggttgctcagcagcagggccacgccaccgccgcgcttggagagctggagggccgcgttgatgccgcgcgaaatcgactccatgttgtcttcgatgcgcaccaggaagcagctgaccggttcgccacgctgggccttgccgaggttcaggaaggtcggggtggcgggctggaagcggccggcaagcatttcgtcggcgtattcgatggcctgctgctcattgccggcggcgagctccagggccacagcggcgcaacgctgcgggaagtcctcaagatagaggcgaccatcgaacgtcttgagcgcgtaggacgtgtagaacttgaacgcaccaaggaaagtgccgaactcaaagccggcggattccacgtgctcgtagatgcggtcgaggaattcagcggagtactggttgaagaccgcagggttgtagtactggttgctgatcaggtattcgagacgctcggcggtggaggcgaaccgcttgctgttggtggccacgtgccctgtcacgtattcgcgttcggcggccttgtctttgtcgaactggatcttgccgtcggcgtcatagaggttgagcatcgcgttgagcgcgtggtaatcgtgcgccgggtcgtactgttccgctgcggtgtcggcagtattgtcgagcggcaggccggtggcggtgaggtcagtcattggaaatccttggaatatggcagaagtgtgtttactcagacagttgctccccccagtcaacttcgttgacagctcccctcggagaggggagccaatacctcgagggggtcaagatttactgttcggtgaagaagcggacgaggccgtttcgcacggcggcagtgtcttccggggtgcccatgagttcgtaacggtagaggtagggcaccttgcatttggcggcgatgatgtctccggcggcacagtaggcctcaccgaaattggtgttgcctgaggcgatgacgccgcgaatccactcgcggttggctggatcgttgaggaagcgtttgacctgaatcggcactgctttcttgaccacgccgccgccataggtgggcaccatgatgacgtacggttcgcggacgtttagcgccgggtcggcggcccgcaacgggatgcggtagacgttgatgccttcgtcctgcaaacggcatccggccacgaaccgtgcggtgttttcggaggccgacgagaagtagaccaatgcgccgatcgtcttgccttcggccgcgaattcgggctggctcagactcacgcggacaccgtggcggcggcgcggttgtcggcggccacctgctgggcgacttcgcgaatcaggtcggggcggtagccggtccaggagttgtccggcgtgatgaccaccggagcctgctggaaaccggcggcctgcagctgctcaagggtggaggggttctgcgtcaggtccacggtttcaaacggcacacccagcttggtgagctggcgcttggtggcatcgcactgcgggcaatgcggcttggtgaacacggtgacggtcatggcgactccccttgatgtggttctgatgaacagtgaagcgaaggccatattacagcggtgtgatttgaaatcaaggcactatatgtagtggcgcgtgtcacataacaaacctagatatagggtttttcgttgatattccgccattcccatgcacccccgaaaatcggcgtgcagcgacccgcccaatcacgtgtggcattgttcacatttgcgtttgaaccgctcttcgactgatcctcaaccgccctgcaaccgccatcttgagtttcgaggggctgttttgaccctttccggagatctatctccgtttcgaggggctggtactcaagtaagcgcatccccaaaatggcggaatgacggtggggcgaagccgtttatacccgtgttctagcgggccaccagcccctcgaaacgggagtaaacctctacggaaggccaaatcagcccctcgaagcggagaacggatacctcggcaccccgtgtggagccagaaggcccggccggatgtccaaacgagcatccggccgggccttaaaagtagttgttcagttatcagaatcgatgcggcgcgatactactccgcgtctttacggctccaacagatcttcgatgcggcagccaagcgtgcgggccaaagcgagcacggtggagacggcagctttgccaaggtctttgcggcgctgctcgtacatttggatggagcgcagggtaacgccggagcggcgggccagcccggattggctgagtccggcgcgcacgcggatcgtgtgcagccgggagtcgccctcggtgcgattatgggcggcccgctcgtcgtacacgtcgacgaatcggctttcgtcggcttcgtgcagagtcgggtgcagtcgcacgatatcgtcgagcgacagcacatcgagaatgtccgagaaccgcactcccctggtccattggcagtatgcgagtacccatccggcccagtattcgggtgttgagccggcgcgcagtgcggctggcggcatatcgagaatgcgcgcccaaccggtttgccgcatgatttcggccaccagctcctcgccggacatgccacacacgtatttgggcgtgcctcgcccgaaaagcgcggccgcctcggaggtggcgaagaagtccatgaataggccgaccggcaacccgcaatcgttcagcgcataatcgaaggcgccggccaagttggccatggcgtccggcaagtatgtctcatcataggcggggatcatcgttggtcactttctcgcggatgatgtcgcgcatgaacaggccgtcgagatcggcttctgcacttttgcggcggtaggcttcgcgagctgtgcggtcgcgctcgttacgcaatccgtggtaggtcgaagcgcgggcgatttcgcagccttggaaccgcagtgccgcgaatgcctgaggactggcgagtacgatctgcttgccgagctcgcccaaccgcatcgcctcagcgagttggtcgatggaaatcgcgttattggcaaaagcgcgggcgaacgagaaatacgaatcgtcggcacgatatccgacgatgacgtcagcctgactggcatccggcagaaacacttgtttcagatattcgatgccttgcgcggcgacggcggtggtcggctggaaacgacggttttcgaccagcatggccagccagttcaggatggtgtagggcggctgggacaggtccaggaagaggagcccgtccgtggtcaacgtgtaccgattcgcgaaaccgtcatccagtcccgcgcacgcccattccttggccagctcgacgctgcgcgtgcaatagaatccgcggccataatcgttgttcggcttgaccagcccgtattcaggatgcttgatgacatgcgaagagccatgccacagttcgatcgatgcggtctccattggccggctccttctctctctccttacatattcttgattatatcactgtggtgatagtcataagggaaatgcgagatgaaagataccgttgtatacgttcgtacacaacgtgaaatgtatacgaacgtatacaacactgacgtccggagtcatgctccacagtggcgcagcgggcgcgccactacaatcggaatatgggactgaagacgtggaagaagtggacggactggccgctgatggtgctgtccgtggtgtttctggtggtgtattcgtgggaaattctctcccgcacgcatatcgcgctgtgtgaaaccgtcatcaacgtgatttgggtggtgttcgtcgtcgattatgtggtctcgctgtggttggccgacgatcgctggcggtggttcaagcacaacctgttcacgctgctgaccatcgcgctgccgatgctccggcccttgcgactgttgcgtttgctgaccgtgctgcacgtgctgaaccgcacctccggcatggcggtgcgcgggcgcatcaccgtatacgcggtcggcgcggtgggaatgctcatgtacgtgggcgcgctggccgtgtattccgtggagcgcggggcgtccggatccacgatcaccgacttcggcacggcgttgtggtgggcgttcgtgaccgtgaccaccgtgggatatggcgacttctcgccggtcaccttccaaggcaagatcattgcggtggtgctgatgttcaccggcatcgcgttgatcggtattgtgacggccacgctggcctcgtggatcgtggatcaggtcaatctggagacggatcggcgcgaggacgctcgggagaaggaagtggccaaggaagccgcgcaagaggctattgcgacatcagccaatcccgaaatcgacctattgcgcgaggaagtgcgtgagctgaccgctacggtagccggtctgcgcaccgaacttgagcgacgttgattggcgaagcgggacaaacaacgattctgccaagaaggtccgcgtcagttgttgtcaccgcggattgcggcaggatcattgtcgccacggctgttttcttcagtcggctcaacccagcttttgataatttttatttttttgatatttttgataatttttattttaggttgattcagcgaggaggcggtccacatgaaggcaaaggaaaacccattcaagccaacggcaggaggggaaccgcccctgctcatcggccgaggcaaagttatccgcgatttcgagaaaggtctcgataacggagtcggtgccccagggcgcattatgctcgtcaccggcgctcgtggaaccggaaaaaccgtgatgctcactgtgttcggagaccgggccaaagcgcgcagatgggatgtcatcgaagaaacggcctctgccggactatgcgaacgccttgttgatgccttacgaaccgggcgaggggcccttgaccacctcactatccgaccatcgttgacttttgctggagcgggcatcggcctcggagaagccgaactatccccgaagcgtatgcccgaaacgttgagaagtgccattgccggacggttggatgcgcttgagaagcgccatgctgggttgcttatcaccattgatgagactcaagcggctgagcgatccgacatgattgccatcgccactgccatacagcatcaaatcagggaacgacgcaatatcgccatcgtgttcgccggtctcccacagatgatttctgatttgttcaatgacgaagtcatcacgttcctacgtcgcgcgaaaacgaacatactcacagatattcctcttgatgaagtgcgcgatgctttcgccacaacattccgcgcctccggcatgtccatcaccgacgctcaattaagcactgcagccaatgtgacagccggatacccctatatgattcaactggttggctaccatatctgggatgccgcagacatgcgggactcggataccatcatcgacgctgatgttacggcaggtatcgaggaagcacgtattgaccttgataacgccgtgtgcatcccggagttgcaaggcttatccaaaaacgaccgtgagtatctcgaagccatggcagcgtcagatggtccctctcccaccgtgaatgttgcacagcgcatgggcaaaacgcctaactatgccgccacctaccgcaaacgcctccttgacgccttcgttatccgcgaaacagaacgaggcgaagtcgattttgccgtgcccttcctgcgcgaatacttgcgtcggaatcagtaatcggcacaatgcacagtatcgatatattccgttccatataatgacttttcgcattcagatacacaatggacggcctgttgagtagcactcagcaggccgtccattctatttagctattcagttatcggagacacacctcaggccttgaccggagcgccagcgacctgctgggaggccatcacgccgaacaggtagccgtcttcggagaagtattcgaaggtacgaccggcgaagtcgcggcattcgaatctgatatcgttatcgattcgatcagcggctcacgatactgcccttgcatcgctgtgccactgttgaatgtgcccggctggctcacctttgggtcaccgccgacacatccttgatgccgatggttatagagtcgcaaattcacgactggcgcacctgcccacgcacctatcctgtcatttcgagcgcataatttgctaccacatccggtcagggcaatcgaccttaatggcgtaaacggcacttctcaatacgtaaacggcatttattcttggctcccctctcagagaggggagccaagaaatatcaagctcggcctcccaggagagagccagaataatgcaccagcaaggcattaggatggagggcatgagcgatttgaacgcgttgaatcttgagtccggcgaagtggttggtgggtatacgctgatctcccggctcggctcaggagctatggggtcggtgtggcgggtgcgcgacgacggcggcaccacctatgccatgaagattctgcgcgactccctgaccgacgagtcagtggcaggctccggctctgcgtccacggccctgcacgaccccgacctcaagcccgatgtcacgccgcgcgagcgcctgcggcgcgaggccatggccttgaagaaggtcaatcatccgggtgtgtgcggcatcgtggatatggaactcgacgatacgttggcgttcatcgtcactgaactcatcgagggcaagaatcttaaggatgatgtggccgccaatggccggtatgtgggcgacgatctggaacgcttggcccgcaagctcatcgacgccaccaaagccgtgcatgcggccggcatcgtccaccgcgacatcaaacccaccaatgtgatggtctcagcagccggcccggtgctggtcgacttcggcatcgccatgggcgagggggaaagccacgtgacccgcactggactggtaatgggcacacccggattcatagcccccgaaattattgaaggggctgaatcagatgaaatgaccgactggtggtccgtagcctccgtgctcgccttcgccgcgaccggcgcaccggtgttcggcaccaaaccgatgatggcggtgttagagcgtgaagcatcaggcaacgcgaatctcaccgggctgccggccagcacgatggccgtgttccgatcagcgctcaaccccgatcggtcgaaacgctgcacgccagatcagctcttgaatgccatcgccgtagacgctctggatcccaacgtctggcaaggcacgcaagccggcccattcgccgcaggggccgtcgccggttcggccgccacaatcgccacagctacgactgacggaaccgaggcgatgcccccttttggcgcaaccgccgacgcggatagcgataatccgcgggccatctggcgtcaggatgatgaggcaacacaactagtaggcagcaccgccgaaaacgccaccgaggcgatacaccctgacgtcgaacgtactgagccaataagcgatgagccaccggtcgccccgaccacgccgctgtctgaacgcaccgccgcgctgcccacaccacaaccagtgccgcagcccatccctcagctagcgccgcaaccagtcccattcgggcaaaacgggtggaatccggctggcgtgaataacacagcggtggatccggcgatccgccctgccatgcagcacatcatcaaccaagccgcgcaatccgtgcccaccgaggcactgatgcagggcccgcctgcgcccaaccccgcggatgtgcgccgcggaatgtatttgcataacggcgtattgccactgtttctgcttgccgtgccggtagccgtgctggccgcaagtttcccgctcatcgccctcattgtggccgaaatactgctttggctgctattgacgctggcgtacaacaccgaacctcagctggaacgtgaaggccggcgcggcggcgagcgcaaaaactctgattcgctgattcgcgtggccacattgccttggcatatcgtcaaggccctgctgctgtcagcgccaagactgctactgctggctatcgtccatctcgccggtatcgtcgtcaccacagtgctcatgggacttcccgtacgcgagctttcctggtatttcaccgcagaccggagcattccgattccactgcttgatgatgtgccattctccatgtgcggactgacactcgccggattcatggctatcggctggctcatcaccgtcttcggaccacagtcagctatgattcgcctcggcgccggcgtactgcgcggcatcaccagcacacgtcaggagcctgtgacaccgttgccggcgaatggttcccccgcaacgccgaccaccgaacgaggtggtcgcggcacggcactgttcacaatttggattatcgttacgctggcgctctgcgcactgccgctgctaggtatgcccattagctggactccattggcatagttcggccgcagccctccctgttacaccaatcacacttttacagggaattcaccttccagctaatctgagcacggtcttcctcaggactggtcattatgatggggccaaacaccgaagcgatctcaaggggatatccatgtcagatcagaagcaccaagccaagcgtgctactcgcgctgaacgtcgcgcagctgaacaagccgcacaacaggcacgggccgagcaggcagccaaggagcgtaagcagcagaccatcatcggctgcattgtggtggccattattgtggtgctggtggccatcgctggattcgccgtatacaaggctatgcggccgtccaacaccagcagcagtagccagcaaagcaacatgaccgtggacgaggcctatagcaagctcaagaaagtcagtacccagccggctaacgccgacgacaaggccggcttcgtaatctccaacaaagggtatggccagaaagccgagggggctcccaccgtatccatctatatggagccgttgtgccccggctgcgcctcggtgaaccgccaactcgacccgacgctcgtcaagctgatgaacgcaggccagctcaacatcgatttgcacttcctcaatttccagaacaacaagagctccgacaactactccaaccgcgtgttcaacggtgccatctacattgccgagcatgatgacgatcccgaccacctcatgagctacctctccaacatctacgctgaggatttccagccgggcgaattgtccaattacgagccggtaagcaacgccaagctggagaagcaggccgtcaaggccggcgtgagcgaggatgtggccgccgcggcgttcagcggcaagaacgaatacctcgactggctcaccgcctccaacaactacacgatcctgcgccccgaactgttcaacagctccggcgccttctcctcccccacactcaccatcaacggcgaatactgggatctgaagcagctcacgctggcggacacgaatatggtggacggcttcctcaagtccattgggctggatgctgaccaggtaggcgtggaaggcaaaatgccatccatcggtgccagcggaaagccgatttcggtcgcctcctgatgctgcgtggccgaataagttgacgccgcgacatatgcaataccgcctgcggctcggcttaaattgaccactcgggaagtaccggtatactagtcatttgttcgcaacgatttacgcgttaagaacaatcgcctctttagctcagatggccagagcggccgccttgtaagcggcaggtcgtcggttcgatcccgacaagaggctcgacgcgtagaaaagtggcgtattatatgatacgtagacttttctacgcatataattcttaccttgggtaagtactccaggagccttcccccaactatgggcttcctggaatgagggcggagcgtcccccaaccagctccgcgccttcaggggggcgggaacatccccttctctcccgccccctttttcttttctttttttgagctcagaacaatctgacgagcaggaatggtgacggtggccggtgaaaccgcagtatgggccggaacaaccgttacgatgggtggcgtaatcgttcatccagcaggaagagtatggcaatggcacggcgttggaccccgcagcggtttgttacactgcgtcgcatccgcgtaatcgcctgtatcgcggcgaccagtatcgcgctggctggatcattcgcgttcaccgcgcgtaaatccgtagccctgaacatcaacgggcaaaccacccaagtcaccacatatgcgatgacggccacccgtcttctggaggaacaaggggtggatatcaagacccacgatatcgtcactacctcgtccggcgaccaactcgccaatcatgccgtggtcaccgtacagtccgcctaccagaccactatcaacatcgacggcacgtccgttcccttctggaccgtggccaccagtgccgaccagttgctgggatttttcgaggaaaaccagaacaacgccacaaaaatcaccgtcgacatcgacaatgtgtacaaccagctcaccggcggactggtcatcaatcaggatggcccggtcaccgtcattgcggacggcaagacttccgtggcccccaacggcaaactgcccgcggcctccattcttgactccaaaggcatcgtgctgaacaaagaggaccgtgtgagcgtcgaaaaggacggcgataccactatcctgcgcgtacggcgcgtgacgcatggcgaggaaacgcgcacagccgtagtgccatactccacacaaaccatcatcgactccaatcttcctgaaggccagtcggagatccgccagcaaggcgtcaatggcgagaaaacccaggtgtataacgtcacgtatgtcgatggcgtggccgaatcggagacgctgaaatccgaaaccgtcaccacgatggccatcgaccagatcatcgccgtaggcgccgccaagtctgataccgataaaggttccgacaaaaaatccgactccgccgataacggcaaggccgattccggttccaacaatcagcacgagtcgtccggtaacaatgccaacaacacaggcgacaagaacaacagcagctctggcaacaacacgaacaccgataccaacaacaatgccggcaacaccggcggcaacaactccggtaacaccggtaacaccggcaactccggcaacactggtaacaccggcggcggtacgaacaacaattccggctcttctggctccgattcaggcacaaccaccacgccctccggccgcctgtggcacgccaccgtagcccaggctcaggcctatgccgccggtgccgccgcgcagcgcgggtggacaggcaacgactgggattgtctggtcaaactatggacccgcgagtccagttggctgtggtatgccgaaaacgcgagctccggtgcctacggcattcctcagtcgctaccagcagacaaaatggctgcgttcggtgccaattaccgtgacgatgccgccgtacagatcgattggggtctgtggtacatcgcacaagcctacggcagcccgtccaaggcatggcaacattccgaacaagtcggttggtactgatcggttacgaagcccacaaggaacacacacttatgaacgacaccattcccgccaccggtcacctgttaggtgccgccgatatccgtcgtatcgcggccgatgccggcatcagccccaccaagaaattcgggcagaacttcgtcatcgaccccggcacggtccgtcgtatcgtacgcgaggcgggagtgaccgctgccgatcatgtcatggaagtcggccccggcctgggatcgttgacattggcgattctggaaaccggcgccaccatgaccgcagtcgaaatcgatccgccgctggccgaacgactgccgggcacagtcgccgaattcatgcccgaagccacgtcacgactcaccgtcgtcaatcgggatgccttaaccgtcaccccggagaacgtgcctgatttcaacggcgacacatcgtttacgctggtcgccaatctgccgtacaacgtggccacgccgattctgctcacgctgttggagcgtttcgacaacctcggctcgttcttggtgatggtgcaaaaagaggtggccgacagactcgccgccaagcccggttccaagatttacggcacgccgagcgtgaagctcgcctggtatggcaccgccgaacgagtgggcaccatcggccgcaatgtgttctggccggctcccaatgtggattccgcgctcgtcaaattcacccggtatcaggccgatgacccggctgccccgggaactgcgaacagcacagacgacggcacacaacgggaactcgtatttcgtctggtcgatgcggcattcggtcagcgtcgcaagaccctgcacgcggcattgaagaccattgcgccctccgaggcattctccatcgccggcatcgatccgacccgtcgaggagagacgctcaccatcgccgaattcaccgctctggccaaggccatcgaatcatgtggagatggagatgatgcacaatgagtccggtaacctcacatccacgcccagccgctgcccgacatcagttcgatgagctctcccccatcaccattacggtggattgcccggcgaaaaccaatctcaccttggaagtgggacctgctcacgacgaatggggcggacgccacgaactggacaccatctactgcgcaatcggcgtatacgacaccgtcaccgcaaccgccaagcaacccggagcaggattctctctggagctcgaaggcgcttatttgggcgacttggcctcctcacgcaacgacatgcgccgcaaccatgcggtactggccctcttcgccatggcccaggcggccgagcgcgagccggatgtggcgttgaccatcaccaagcgcattcccgtgggtgccggactaggcggcggttcagccgacgccgcggcgaccatgctggcggtcaatcgtctctgggagctgaactggcccatagagcgcctgcgcaccattgccgccacgttgggcgcggacatgccgttctgcctgaccggtggccttgcatacggcaccggtttcggcgaacgcatcacggatatcgcccccggcagccgcgatgagctggcgctgatagaacagggattcagcggcgaagtattggtcggcgcataccagtcgcaactcagcactcctgaggtctaccacacctttgacatcgtgggagccgcagaaggcgaccgcaatcatctgcaggctgcggcaatcagcctgcatccccgcagcgggcaggccatcgacgccgccacgcaggcgggtgccagccatgcattcgtctccggatccggcccctcagtggtcgctttcgccgccgacgaggcagcggcacaacgcattatcgaggtgtggcgcgatacagctgtggtcgatcgtattattcgagccaaatctcccgaacaccccaatatcagcgtcagacagtgacgctaaggtagcaaccagccacccgacccatgaaagaagtccaccgatgacgtatcaggttgatgaacgtgaagcccgcaaggcgtacgtgcgccgccgccagaccatcgtcttttccatcagcggcgcggtattggcagtagtgctggtcatagccctactgttcaatttccacgttttcggcctcggcgaagtggagactccggccagccagccgaattacggcaacgcggcgccgtgcgcggtcaaggacagcagcggcaaagcgcaatacgtgtccaacgcttcggtcggcattcgcgtgatgaacggcacctctcacggccaattcgccaaggccgtgggtgaagctttggccaatcgtggattcagcgtgcagaaaatcgataactattccagcaccgacgttgaacgcaccaccatctacttcggcaagaacgccattaatcaggcgtatacgctgatcggcaatttcaccgacgccaccatgatcatgacggctcgcgaggatcagctcatcgatgtggtcatcggcgccacgttcaacgatctgcaggacaccaactcctccccgcaatccggtaagaccatcaccaatatcgagggttgcaaggccgccgatagcatgaccaagctgcccgccgacaccaaacacgacgcatacacggcgcagtaaggcgcatacagcttcatcttcgcgaaaaaccgtacgctgacacgtattcagcgtacggttttttggtatcggactagtatcggactactgaatctcggcgtaccagcgcttgagttcttcgacggccacatcgtggtccaccggaccgttatccaagcggtattccagcatgtgcttgtaggcgcggccgatcatcgggccgggctccaagcccagcaactccataatttcgttgccgtccagatccgggcggatcgcgtcgaagtcctctttcttcttgagttcgcggacgcgctcctccatctcatccatggcctgggagaagatcatcgccttgcgtttgttttgtgtggtggcatccgcacgcgtgagcctgttcagccgctcatagaggtgcccggcatccttgacataccggcgtacggccgaatcggtccacggctcgtccacatagccgtggaagcgcaggtgcatattcaccagttctgagacgtcctcgaccagatggtggtcaaaacgcagcgccttcaaacgcttgcgggtcattttggcacccaccgcgtcatggtggtggaagctcaccttgccgcccggctcgaaccggcgggtcttcggcttgccgatatcgtgcatcacggcggccaagcgcagcgtcaggtcgggggcgggcaccgggccgtccgggccggtttccagggcgatagcacgttcgagcacaatcatcgtgtgctcgaagacgtccttgtggcggtggtgttcgtcgatctgcaattgcagggccggaatttccgggaagacgatgtccgcaagaccggattcgaccaacgcctcaaggccggcgcgcggacggtcggagagcagcagtttggtcagttcgtcgcgcacacgctcggcggatacgatgtcgatgcggtcgcgcatcgaggtaatcgcctcggccgcgtccggcgcgatacggaagcccagctgggccacgaatcgcacggcgcgcatcatacgcaacggatcgtcgtcaaaggactgtcgcggatccaccggcgtgcgcaacacgcccttggacagatcactggcaccaccgaacgggtccacgaattgcaggtcgggcacgcgcagagccatcgcgttgacggtgaagtcacggcgggacaggtcgccctcaagcgtgtcgccataattgacctcgggcttacgcgagtccggatcgtacgtgtcagagcgataggtggtgacctccaccttgacctcggtgccgtccgggcggcggcgcatggcacccagcgtgccgaacttgcgccccatgtcccagaagccgtcatgcccccaccggcgcagtatcggctcgaactgctcaggccgtgcggatgagcagaagtccaaatcgtggctctttctatggagcagcaaatccctgaccgggccgccgaccaatgccagctcgtaaccctgttcggcgaacagtcgaccaagttcgatggcttcaggccatacttcgaaatccaatgggcaccttcccgcgtgcgacgtttttctgccctaccagcataccgttaccccacctgcacacggggttgagtaaggtggagaatatgattacgcccgccgaccttgcccgcatgctggggcaaacaccagattcggcggatagccatacccaagaccacctgctgtatacgtccgaaactccgcatcattccgccgattcgggcgattcttccgatgtcggcggcaccgcgagccactccaccaatcaggccgttcatcaagacgaagtagacgcagtaccgactgcgcaacattccggtgtgcctggcacacccgcaacgcccgccacacccgaaccatccgaatccgaaatatcggacgccgccagcgacatgcccgcaccgaagccgatgatgcccacaccggccaccgtcttcggcatgcatgccaccgtcaccatcgccactaccagcggcactatcgaggggcaggctgatggtatcgccggcgaggccggtgccgagacgattgccgaggtcgagccgattatcgccacggcacaaacgtccgtaaccatcgtcacgaacgatcccgcggcgaccgctcacgcggccgtagatgctgccgttgcggtcgccaaggccgccgccgcgcacaccacagcgataccgactccgcgcgacgtgctgatgccgcctgcggcacgtaccgcaccggccgcaacgccggtcaccatgccggtctcagcgccgtctgcagcaccagtgaggcccgcaacgtcagcgcatcccacgccggccacggtcttcggccggcacccgtccggagatgttgcctcgccggaaccggcagtgccggtagaaccggtgacgccatccggcccgactccggccatgatgccgcaacgccgtacgtcggacggtccgaccacattcgcttcactggatgcccaggaactgccggtcgtacgcgaatattcggcaggcggtctgattttcgatgaccagaaccgcgtggccattatcgcccgtcattcccgctccggccatctcgaatggtgcttgccgaaggggcatatcgaaaaaggcgagaccccgcagcagaccgctgtgcgcgaagtgcatgaagagaccggcatcctgggcgaggtgatcgattccatcgccaccatcgactactggttcaccggtaccacgcagcgcgtgcataagctggtccatcacttcgcgctcaaacagaccggcggcgaattgacggtggaaggagacccggatcatgaggcggaagacgccatctgggtacgttttgaagatttggatggcgtgttgagctatcccaacgaacgcaaaatcgcgtggctctacgccaggaagaagaacaggcaggcaaacgagtgaacctacccggagtcttacgacattacacacgtctggcacacgcactggcggctggcgtcgccgttgtggcgatgctggccgctccattgaccgcctacgcgaacgatacgacggacacgactgattcatccgatacgacggacgcaacgggcaatcagaccgagaatcagcccaagcagagcattgccatcacgcaaagcacccccatcgtcacctccaaatcgggctatcgtgtcaccgcggtcatcagcaatacggacagcacggccacgtcaagcggcacactgcacctgaccaccaatgcgttgttcacctttgtctcgcgcaccgatattcagaattgggccgagaacaacgcccccatcccaacccccaacgagttgggttccgttgacgtgccatcgattcccgccggcggcactgccaccgtcaccatcgaggtgaacgccaatcagcagacccttgcctccatagggagttggggaccgaaaccgctgatgctgtcgtatatcgttggcaatcagatactcgccgatttgccgagttttctgacccgatcttcggatgggctcaacaccgcgacaacaccggccatgaacctgaccgtggccatgccctacaccgccagcggctggcaggtcgataataaggccatcagcaatcgcattgccgaaaccaccacttcctcgacatcaacatcgtccaagtccaacagcacggacaaggccgacaagtccgataacgccgacgccagcaacgcggccaaagccactgatacgcaagccatatccttatccgaacaggatgccgataccgcgcgatcccttgggcagacattcgccaagcaccgctcgctgcaagtgatcgcggatcctctgtattggcgtcagtccgcagtgcaaccgtccattgccggcatcatgcagcccgccgacttcgacatcaccgcctataccgcactggacgataccgcggcctacgaaaaggccggcatcaccactgagcagtggaacgccaagcaggcggccgcatggtatgccgacggaggcgactccgaaacaccctccgcgtacgcatggcagggcaacaactgttggacgttggatgcgctgaccgcagcacgcgagcagggctatgacacggtgattgccgatgcctctttcgatgccgaccagactgaagccgtacacacaggcacctacgtggtgcatacgcctgccggcgatgtcaccgtgctgaaggagcaatcgaccttgggcacgctggccaagggccaagccaccagcacggacgcgcaggccgagtccagcgatgccggtcggttggcccgactgatcgctcagagcgcgttctaccagatggaacagccctatacatcccgatacctgcttatgacgttctcccgcaccacggaggccagctggatcgatcaggtgatgagcgccttcgagcaggcgtcttggttgaatctgacggacctgaagaccatggccaaggccgatccgtacaatgtcagcgattcggtcaatcccgacaaggccgatgatgccaacaccgccaatacccggtcggcattgagacagttggccgacagccggcatgacatcatgcgcatggccacctccatattgaggaacgagattgattccgacgaggtctcgtcgttggacccgcaggccctggcccggcaggacgccaatgacaccgcctcgcatagcaacgatccgacgcaatggattggctctttactggtgctgcatgacgatatggcgctgcggtccatgtctggctccccccagccgacagccacgcgaaaagccatggtcaaagccgcgaaaacactggccagcgatcttctgaacggcgtacgcatcaacccatcggaatcggtatccgtgttcagcgaatccgcgaaaatgccaatcaccgtcagcaatgaccttccctacgccgtcagcgtgcaggtcaactcactgactgactccatgcagatcgtcacctcgcgaaccgctgacatcgatattcccgcgcatagcgacgctcaggtgaccttcaccatccgcgtttccacttccggctcatcgacggcccatgtgtcgttgaccgaccgggaaggcaacagcttcggcaacacgcaggacaccgcgatcaccagtgtgatgcgtatcagtgatgccagcggcttcattatcatcggcttcgccgtgctactgggcattatcggcctgtggcggcagttccatcggaagaaggaccccgacgaatgagttcaagcgtaggtcgtaattccctgatcatggccacgggaaccgctgcttcccgtgtgaccggtcagctccgcacgattcttctcgctgcggccatcggcaccaccggattggcggccaacgcctatcaggccggttccatgattccccaatccgtgttcacgctggtgtccggcggcatcttcaacgccgtgctggtgccccagatcgtgcgcacgttgaaagaaaaagacgcccaagaacgactgaatcgcctgattacgttggccatcggcatcctattggccatgaccgtggtgatggcgacggccagccctctgcttgcccgcctgtacgtgggtagcgacgatcaccagatgatagccctgaccacctcgttcaccctgtggtgcatgcctcaggtgttcttctacggcctgtatacggtattgggtcagatcctggccgccaaagaccatttcctcacgtatgcgtggagctcaaccggtgccaacattattagttgcgccggttttactggctttattctgctgttcagcaaggccaatgaacagcccctcgaattctggaccgccgacaaaatcgcgcttaccgcaggcacctggactttgggcgtggccttccaagcgctgatactgttcctgccgctggcccgtatcgggttcaagtacaaacccagcttcgggcttggcggctttggactcaggtctatgggtcccgtggcgttaggctctttgggcgtggtgatcaccagtgagatttccggcattatccttacccgtatcgccacatccgcaccgcagcgcgcccacgaactgaccggtgccagtttgttcagcgtggcaggcaacgcgacctatcagaatgcgttcacgctgtacatcctgccctattcgctcatcgccgtatcggtatccacggctatgttccccaaaatctcccgttccatcgcagctgcgaatctggatgaggcacggcacgacctggtcaacgcactgaataatgtgggcctgctcatcatattcttcgccgccgccatggtcgtgttccccgaaccgatcatccgcgcattgcttccgtccgtctcgatggacgagactatgttgatctcctatgcgcttatcgccttgtctatgggcatcccattggggtcggcgttcctgctgatccagcgcacgttctacgcctttgaggacggccttcaccccttcctgtccgcggtgatgcagtatgggttcatctcggtattcatgatcatcggcatgatggtacttcctcctgagcattgggtactcggcatcgcctgctcggtgaccctcggtggattactggcattgccgctgacgttgatgatgttgcgccgcaagttcgaaggcaatcttggcggtcgggagatcacgaggacatatgccaaggccattgtggcggcactggcttccggagttgtggtctggctgatcaaacgaccggtagtcgcactgttcggcgcggatattcgaccagtaggcgggcacatgagctggtggtctgcgctggccatctgcgtggtgctcaccattgtgctggccgtagtatatgtggctgtgttgtgggtggtacacaccccggaactcatcagcgcctatcactcgatactggcccgtctacacaagactccggccagtgaggacgttgctgtgacagcccagccggaaaaaagtcgacgctacgtaaatcaatcctgagacggagcccgtcaaggatagccccgcacgtagaatatctaagaccaatctcgaacaccaatcacacggagccgaacgcactatgaaaccgcaactcggagacacgattctcaaccgatacaccttggtatcatcgttgcgtgaggagcctggcattcaggcatggaaagccaacgaccgtgtgctggcaaaggattgccagctgttcatcattaccaatcgcagcgctttcgccgcaatcgatgagctcgctggtcgcatggccgccactcgccctgatcgtgtgattcccgtactgaaataccgtatggaatccgacgtacttctcattgtcatgccggtggatagcggccaatgcctgactgactacatggtggataccgccaagccgctcagctacagcgccatccggtcgattatcggagaatgcgccaacgtgctgcgcgaggtcattgcggatactcccagcggcatcgtcatcacaaccgacaccgttcgagtgactacctccggtgtgcaaattgccgatgcaccatgtgccacgatgctggccgatacgtccgctaccgatctgcgtacggacggtcctgaacggtatgcgattcgccagcttgcggcattactctataccctgctgacacgcacgccaagccaagcgacacccacattcaatctgcgtgccttgccgcaagacacccctggcgaattccgcgtgatttgcaagcgtggattggccttgagcgagcccgacgagcatacgttgccaatggcagcccttgtagaactcgacgccttgttgggtaattggaagccgctctctgaactgagcgatgctgatatcgctttgccgagcgtggaaagcgattgctcgattaccaaggcgatactgaagcctgccaacgagactgatatcgtgcctattcccagcacgttgattaacagcaacagtcttccggaattgtctattaccccttccctgccgattcagccggccgccgtccccgctccgcacgcgatgtcaccggttcctctgcctgatgggtccagtactgctgacggcaaccagtctcagtctgatgcccgccgtctgtttgacttcaacctttctgacgcctgggagcacgaaaatctttccggtgaaggcaccggtgactggtacagcgaaatgaatccggcccctatcggcggtccgggtgataatactcggttgacagtgcctattgttaccggcggtatttccgatgccaccgtgggagagacaaccagtcgtattcccgtgttcgacgccagcggccgtgctgtggctcccggtgaggaatcactgcgtgccttggaagaggagcaggcccgcattgccgaagtaagcgccattcctccgagcttcacaccgaaggatgtgccggatgacgaggttgacagcaagctgcccgatgaacatctgttcggcaaactgtcgaccaaggtcgttgccatcattgtggctctgatattggtagtggcagcggctgtttgggcagtgcatgcgttccagtcctccggagacaatcctgccgatgcttccatcaactccagtgaaggtgactggcctgatatcaatgctgacgctgtgccatttggtggcagcgagaacgcgacgaacggtggcaccactgacgattcttcaaagtcgagtgatgacactcagagcgaatccaaggactcggtatcagacaagtccaagaagtccgagactgctgattcgtcgtccaagaagtccggcgataaggattccagcgctgttccgcaaccgagccatgagaacaacacggcgtttacgatttccagcgccaacttcctgtcgaatcctggcggccaatccgggtacgcatactacatgcaccttgaccagccgcaggatgcgtaccgcatggttatcaccatccgcacatccggtggtaagggctatattcgcgcaaataccactggagaccccactcagggcaagcaggtggccgaattcacctttgctgaaggtggcactactgaggtgaagttcaccaaagccgtcaagacgcaggatctgctgctgtgggtgccatcggatagcctgccgcagaaccagctgtacatcgaaaaggtggaggtcttctaatcggcatctatgccgataactgacccaagaaggggtggtaccgttcgcatacattcgacggtaccgccccttcttcgcatctggctgaatgacacggaatatcgtatgggggtgtgacaatgtttcacgtgaaacataacgtcatcattatcggttctggtcccgctggctacacggccgccatctatcttggccgcgcaggtctcaatcctgttatggtcactggtgcgttgtcgccaggtggacagttggtcaacaccactgaggtggagaactttcccggattcccggaaggtattcttggcccggatcttatggatcgcatgaaggaacaggccaagcgcttcggtacaacctatatcgcagacgatgtctcttccatcgaggcgtgtgagagtgattcggtcaagccgacctatcgtgtaacactctccgatgactcccagttggaggcatcgtcgcttatcatcgccacagggtcgtcattccgtaagcttggggtgcccggcgaacaggagctgtccggacatggcgtctcgtactgcgccacctgcgatggcttcttcttcaggaacaagcctatcgtggtcgtaggcggtggcgattcggcttttgaagaggcattattcctgacccggttcggttcttcggtcaccttgattcaccgacgcgatagcttccgcgcctcgcagatcatggtggaccgagccaaagccaatccgaccatcactctgatgaccaacacagtggtgacctccattaccggcacctcctcccccacacagaacaccggtgcacctattgccattcctggcttgacgctcaaacgaccggctgtagcaccggccagtgtcagcagcatcgccgtacgtaacgtggtgaccggagaagaaagcacgctggacaccaacgccgtattcgtggctatcggccatacgccagccactgattttgcggccggtgttgtggaccgtgacgatgatgggtatgtcgtggtgcagggtgccagcacggtcaccagtgcgccaggcatctttgctgcaggcgattgcgtggatcgtacttatcgtcaggcgatcagcgcagcgggcatgggctgccgtgcagcgctggatgcgcaggcttatcttacggactgatggtggcggactgatggtggcttgctgttctggctactgcctgtgacataggagcaacgctaggtcagtgttacagcatgccgcccttggatagtacgtatcggtcaaaggcatagaaagacccctcaggcgcggagaggttgtgcccgatgttttgcgcaaatgtggcctggtccgtcgtcgggggaatgggggctgcggacattttcttggagataatcacgcagccattccttggctttgacggtattgtaccgggctcatccaaccaagcgactgtttgatgcgctcgtggttgtaccagcgtatgtactcatcgaccaaggcgagcacctcgttgcgggtgtgttcctcccacttctcggggtagaccgcctcggtcttcatcctgccgaagaatccctccgcggccgcgttgtccggcgaacagcccttcgcgctcatggagcgcgtcagcccgaagcgttccatgagcccgagccatccgggccaccggtaatggcatccacggtcggagttaaaccgatgtcggtttaattccgattaagccgggtttgttgttaagccggggaacggttcggggtcttggtggctggccgtgtcccatgtggtttcccggcttaacgttccgggttatgttcgtcttgtcccatttgattcgaacgaaggagtttgccatgggtgagacgacggttggccatgtcgcgggcgaggtggtccgcgcgctttacggggccggttatatggaatccaccataggccagtaccgcaagtccatcagggcgttggaacggtacgccggaggcccggatgcggtgtacacgcgtgggttgggcgcggggttcgccgcgtcgaccttcagtgagcggacgggcggtttcagcaggcagcggtggttcgattacggcaggctggcgcgtttgtgcgactcgtatctgcggtccggttcggtggacctgggcaagtggcgcaggagcaggcttgcggagccggtggttccgggtttggccgtggtcatggagcgttgggaggcgtatctcgccggttcgggactggcttcggcgacggtggggcattaccgtcggatggcgggcttgttcctcacgtggctggaatctcatggggtcgtgtcgttggacggttcggatggctcgcatgtgctggggttcctggccgggctgcgttcacgctggtcggagtcgtcgatgcggcacgccgcgtcggacctgcgcccgttgttcagatggctcgggcgggatgacctggcggacgcgatcggcctggccggcatacgcaggacccacgcgatcgcgggaacgttgcccgacgacgagcaccgccgcttgctggaggcgtgcgcctcgcggtcggtgccgtcgagggacgcggcgatcaccctgctgtcgctgacgtgcgggctgagggcatgcgatgtgatcggtctgaggatcgccgacgtggattgggattccatgagcataggtctggtgcagcgaaagacgggcaatccgttgaccgtgccgatgacgggaccgctggccgcgaggctggcgtcctggctgttggacgaaaggcccgccaccgacgacgaccgtgtgttcgtgcggtacaaggcgccccatgtcgcgcttcggggtcattcatcggtgtacgaggcgatcagccgtgtcatgcggcacgccgggctcggacgccggggcggttccaggctgttgcggcgcaacgcggcgacgaggatgctggaggcggccacgccgttgccgacgatcagcgcggtgcttggccacgccgaccccgattccacacgcgtctacatggccacgcaccgcgggggaatgctcgcgtgcgtgctgcccgtgccggaaggcggatcgtcatgagacccacggaacacggattcgtcggcccgctcgccggcgaattggaggagtacatccgcttcaaggcgtccatgggcaggcatggcgccacccgcgtccaggtcctgcgctcgttcgaccggcattgcctcgaacacggggccgtgcgtctggagcggggcgtcgtggagcgatggatcgcccataggatcgacgcgaatcccgggggttgccgctcgtggttctcgtacatcagggacttcggcaggtggatgcgactggcccacgatcccgacgcgtacgtgctctccgaccagtggaaggccggatccccgcgtccgacgccgtacctgctgacggaccgcgaggccgccctgttcctgcgggccgcgggaacgttggagtctccgtcgccgtgggcgtggcagtctcgcgcgttcttcatgctcatggcctgctgcgggctgcgcacccgagaggtcaggagactcgccgtcgggcacgtcgaccacaaggcccgttccatcgacgtggtcgattccaaggccggtcgcagccgcaggctgcccgtgggcgacgaggtcgccgccgaactgctggaatgcgaccaacggtcccgcgaacgcttcggagacgaccgtcccgcgttcttcgtcacctccaccggcaatccggtctccccgggcatgcccggcgtggtgttccgccgcgtctggacgcgggccgggctcgagtggccacaagccggcaaacggcccaggccctatgatttccggcaccggttcgcgttcgcgaacatcgagcggtggactcgcgacggcgtggacgtgatggcgatgctgccctatctggcggcctacatgggacacgccggcatcgacagcaccctctactacgtgcacgccagccccgatttcatggacggatacgcggacctcgtcgccgacgccgaacgcgtggtcccggaaacggaggaaccatgagcaaggcaaggaaaacggccgccagctccggtgaaccggacttctggcgagtcgcgcgcgactggctgcaccactggctgcccaaggtgcggggcagctcgccgaagaccgtcgaggcgtaccgcatcggcctggaatcctacgtccgatggctcgaaaccacggaaggcacgcagcgcagccacatcggtttcgggcatttcgaccgggcgcgcctgggccggtgggtcgaatggatgcggaccgagcgcgggtactcggaccgcaccatcatgctgaggatgacgacgatgcgcgtgttcctcgaccacgcgggcctcgaacacccggcattgaccgcgctgggcaacgacgcggccggcatacgtgtcaaaccacccgcgcgcaaacccgtcgaccacctcggggaggagcacaccaaagcgttgctgaccgcatggggcaccggcgacgccaaatcgcgcaggaaccgcatgctcctgatcctcatgtacgacaccgccgccaggatcggcgaactcgccgcactgaccatcgcggacgtgggtatggataagccggccagggtcacgctcaccggcaaacgcggcaagagccgggtcgtgcccctgggagaaaggacacgaacccacctggccgcctacctcgaggaattccatcccggaccgtccatgcgcgacggcgacaggccgttgttccactcgacgaggaacggcgccatccagccgctctccgtggaccggatcgacgagatcctcaaaaccgcggcggccagagcacgccgcgggacgtgcccgtccatgcccgaacgcgtccactgccacctgatccgccggacccgcgccatggacctctaccaacagggcgtgccgctaccgctcatcatgcaactgctcggccacgaaagcatgagcacaaccagcgcgttctacgcgttcgcgaccctcgacatgatgcgcaaagccgtcgatgcggccaaccccggccccgacccctccaaggagacatggctcagcgagcaacgactccgacaactacacaccctcaaataacccggaacgttaagccgggaaaccacatgggacacggccagccaccaagaccccgaaccgttccccggcttaacaacaaaaccggcttaatcggaatgcaccaggggacgcgcgttccccggcagcgtcgaggccgctttctccagcatccggttggccagctccgcgttggggctgaagccggcggtgtatgcgacgatcttgccatcgaagcagtcgatcatcggcgagaggtacaccttcccgtccctggccttgatctcggtgatgtccgtcagccacttctcgttcggacgctcggccgtgaagtcccggtcgacgagattggcgggagccggcgtcgtctcgccctcgtaggaactatacctgcgtcgcttgggcacgtgcgccacgagcccttcctccgccatgatcctgcggaccaccttctccgatacgccggtcttgagcaccgccttgatcctgcggtacccgtacctgcccttggaatcggcgaacgccccggccacctctgccctgagtccggcgtacttgtcaacgccgagccgggcgtggtggtagtggtagctgctgggcgcgatggcgagcaagcatgtcatcgagctgagcgaatacgccggcctcaaccggtcgatcaacagggtcttctccctgttcgacaggcgccgcaggtcggcgccggggtctttttttacgacctccaccacctcccgcatcaacgcgttctccagctccagttcctcgaccctgcggcgcaaagcctccgcgtcatcatcatcggctgcggacggccggcggcgggagtccgcgggcttattgccctgcgcggagttcctgtttttgggctgcaacgcggccatgccgcccttgcggtacgccctgacccagccatgcaccgcgccgacgctcacgccgagctgtttggcggcctgcttctgctgcatgccgcccagcaccagctcgactgcccttcgcctggtctccagtgggatgatgggtttggccatatggccagcataccgggaatccatcgccagccaacgctccagacactgcctggtcggataacccagatgctccaccacctgggccgtcgtcatcggcgtggtgaaatacaactccaccgcacgctctcgttcctcaagactgaacatacgaaaatccttccgttcggtctccaagaaaacgtccgcagccccttatcgacggagaatcacgatgtgtgatttgtccctccagcctgaggggttttctattgcgacaggggctacaacgcaggcatacgcccctgccaggaatcacgcagaggctataacgtcttgcgcgtacaacgcactgcacagcaataatgccggcgacaacacgaatgttcttatcgtgttacacccatttggaatcggcatcgccttggctcggcaccagcagctgcaggatgcgatccatatcctctggtgacgagaagacgatttcgatgcgaccatgcttggtgctgcccttaatcgacaccttggtgtcgaaatgattttccaaactctgctggatggcggaaccaacccaaggattggtcttggacgtcttgggcttcttcggctgctcccccgacgcaatcttcatggcgacgatttcttcagtgctgcgtacagaaagaccttccgcaataatacgagaagccagcttgtccatttcctccggatcgctcaggcccaatagcgcacgcgcatgaccggacgatagcacaccggcagccactctcttttgcacagaggccggcaggttcagcagtcgcaaggtattggcgatttgcgggcgagacttggacaccgacttggacagttgtacttgtgtcaacccgaactcttcaatcatctgctggtaggcagccgcctcttccagcggattcaaggccacacggtgcaagttttccagcaatgcatcgcggagcatatcatcatccgcagtggttttgacgatggcgggaatcgtctccaacccagccaactgagaagcacgccaacggcgttcacccataatgagctcatacgggctgtccaaatgaccggcaaacggattcgtgctggattccgtctcgtcgtgcttggcggctttggccgcaacaatctggcttgccggacgcttgcgcacgactatcggttgcagcacaccaacttccttaatggaagcagacagctcattcaactcatcctcgtcgaagatggtacgaggctgatgtgcattgggcccgatatcagacagtttgagttcagccagataaccaccggctaccggcttgagctcgtccttcttatctgtgtcagcggtctttgccgccgtcactgtcaaagatgtttcacgtgaaacatctttgacagtgacggatgtacgatgtgccgtctgagacgcagacgacttgccgccctgctgaggtgcggcgaccttaccggtttgaggtttctccgtaccgaaaaacaggtcgctaggatgagtaatagtgtccaatgcgggcatggatgcgcgtttaccggcggctttcttgactgccttgctggacgatatcgtctgaggcacggcaggctttgattcctgctgggcagtagccttcttggcgggggttatgtcagcagtggcctccggagtagacgaatcctccgcaatcattgcgggctgctccgccaccggctcctcccctggcaatgtggggaacaaagcgccaaggcccttaccaagtcgtgattttgatgccattacttgttcctcctcgcatcaatggtgtcaaggacttgttgcgaacgctgtgcgatttccaaagctgcttcaccatacgatatggcacctatgccacgaggatcataggcaatcaccgattgggagaaactcggcgcttcggagatcttgactgaacgcgggatggtggtattcagcacaatgctgggatagtgtcccttaacctcgttatatacttcacggctcaatagcgttcggcgatcgaacatcgtgacgagcatggtggacaccagcagtacgggattgaaatgctcttgcaccaaaccaatcgtgttaatcagctggccaagaccctccaatgcgtaatactcagcctggataggaatcagcatctcggtcactgcacacatggcgttgatgaccaagaggcccaagctgggcgggcaatcaatgaacacgtaatcatagtgtttatctgattgacgtaggtagaggtctagggcctccttcagcaacgtgtttcggttgggcagatcagccacttccaactcagcaccgctgagatcgattgatgcaggcacaacatcaagtgtgggaaaatcaggacagaccgtgataacatcacccagatcggaacgcccctcgataacgtcatagaccgagggctctcccgatgcatgagatacacccaacgccgtagaggcattgccctgcgggtccatatcgatgaccaacacctgcgcgcccttgttcgccagcgccgcagcggtgtttaccgtggatgtggttttacccactccccccttctggttggccacggcgatacgacgagtccgttgaggctttgggaaatcggttttcttgagtacatcgtagcgtgagctttcatcagccatttggctaccaagcactgaaccgtgaccatcgaatattcgctgaagcgtttcggaagccgattctataggttccgactgatgatccttggtggccatcgctcctccttgcacagacgtaagttccagtgttctcattcgtatggacatgatgctcgttatccacaattgcgatatgcaatgtggataagtgtggataagtgtgaatgacgttgagtgttagattgtgtattcacagacgaaaaacattgaaaaatcaatgttttcatcattatgcacatcgtcccgtaaaaatgtggataacttttacgcacatatggaaatgtggataactcaatcagtactccactcatcgcttatccacaatcaccacgtgggtaggctcaagatccggcccgacagccgcctcaacgacacgtggacgacgaccaccgaattttgcaatctccttgccagccttgtcgatttcagcctgagcagaccgtcccttcagtgcaatcaactgtcctgacggtttcagcaacggcaacgtccagccagagagtttggtcataggagcaaccgcacgacacgtgacaacagcgaacggatgaatttcccgcttccgtacctgctggatgacggcatcggagcgtccacgaataatctcaacgttctgcagttgcatcaggccaacacattcatgcaaccattcgattcgccgctccatcggttcaatcagcgtgaagtcatgatccggcaaacacgcggcagccaccaatccaggaaaaccaccaccactgccgacgtcggcaactgttttgaagcgaataccattcgtcgcattccgaacgtacggcacaatcgcagcggaattcagaatatgccgttcccaaatgatatcgacgtcacgggggccgatcaatccacgaggttcaccctcttcggcaatcttggcatggaaacgctccaacttcggcaacgtatcacccaagacctcagcaagtacaggtgacccctgcagctgatccgtcatagccatctccctcaccatgtttcacgtgaaacaatcaacatggagaatggcgccgctcattacgacgccattctccatgcggtcactttagtttgttcaaagacgacatccgtcgaacgtccctgtcatctcaaaaaaactcgccgagcaattactcctgatcaagctcgtcgtcttcggcggtatcctcgactctattcttgagatacaccgtcacgtaacgatgaggctcctcaccgtgcgagcgagacttcagcccctcttcccgaaccacatcgtgaacgactttacgttcgaaggaattcatcggcttcaagtcatacggctcgccggaatccttcactgcgtcaatggcatccaaggcgatatcacggaggtgctgacgcttgcgcttcaggaaaccgtcgacatccacaatcagatgagaacgctcgccggtcttctgctgtacagccagacgagtcaattgctgcagagcatcaacgacttcaccattacggccaataagatgtttgatgtcagtatcgtcatcagcaacgatttgcacggtggggcggtcattacgcacgcccatctcaatgtcgccctcatagtcggcgatatccagtaggccttcaaggtaatccgcggcgatgtcagcctcttcgttgagctggtcgatcgacttcacgtcatcctgtgccatacgctactccttcatgtcgtgtttgaattccaagtctaagccctgctcccccgaacagagaaagtaatgtcggtgcgtgttgaatgtttcacgtgaaacatcgaactcgcaccgacatagtcgtcacttctttttgcgcttacgcacgggctgttgacgctgatagccctgagtggccttacgctcggcctcttccttggccttggccaatgcttcttcttccagagagggcaggccggcctttgcgcggcgagcattctcattacgatgatcgcgcttctccttgtccgccgcagccggagagccaggggtcgggaatgcgtacacctgccacaatgtgcggcagaggttgcacacgttgttggtcagccagtagaccagcacggcgaacggcatggcgacaccggagaagatgtacatcaccgggaagagccacagcatagccttctgcatggtctcggtctgcttgttcatcgaagcagctgccatgttgcgcttcatgctgaagtactgcataaaccacaggcagaaacacatcaggaacacgaagataccgatgaccgccttgccactagcggcagcactggtgaagttatcggtcacgctgacaatgccgaacacatcggtttgggtgaattgcttggcggttgctacgtcgaacgcgcccaacgcatcgcgtttaccgttggcaatgtatggaatggcggacagcgtgtagaacatggacatgaacaccgggccctgaatgagcataggcaagcaggagccagccggattggcgtcattgtcttgatacagtttcatggtttcacgactcatggcttccttggaagcctgatccgtcttacctttgtacttgttctgaatacgctgcatcttcggcgccaatgcctgcatcttgcgcatcgacttcatctgcttgtagaacagcgggaagatacaagcctgcaccaccagcaccaggatgataatggcaagcacccatgagacaccaatcgggctcacgcccagcatcacgaagaagtcatgcacgatcttcatgatccaggtctgcaaccactcaacgggagtcaggattttatatagaaatccccaaaacccgctatcaagcagaaattcatttgagttcatcgttgggcctctctttgggttgtggccaatggtgtcagtcgaggctcttcatgagccttcgaccacgaaaatctgtaaaaaatggaataccgttgtggaacatcgtcgattcccccacgactccacggccggcaacgcagtaatctcagcacggcgagcactccccctttgaacgcgccataccgttccaatgcctcaatggcataattcgagcacgttggataatacttgcaacaaggcggtgtgtttgccgagatgtgctgttgataccagcgcaccccaccaatcatcaccgccttgaaagaagctgtcatgcctcagccaccttatgcgccaccgtggcaaaagccttcgcgatctgctgatctagcgaagcgaacgatgcggtcgctgcactgggcttggcgcgcaaaacgatatcgcaatgcgcgggcagcagatcctcatgggctctggccaatacacgaaacctacgcttcaccgtattacgggtgaccgcatgtcctaccgatttggagacagctaatcccaaacggcgatgcaccgtccggtcgtcatcatcatgatggtcgtcgggcaccaaatagtgtacgacgatatccttgccacctgctttgcgccggcgtttcagcacggtgacgaaatcacgatggctttgaagcctctccacctcgactatgcctgtggcactgatcggaatgatcaggcggagagggacttgcggcccttggcacggcgacggttaatcaccgcacggccagaacgggtgcgcatgcgcaggcggaagccgtgcttcatgtggcgacgacggttgttcggctggaacgtcctcttcataatccattgctcctaggtctattcggcaacgcttcgcgctgccctcacgtgagtcaagctataccaaagtactctcacccctaccctcaagtcaaaacggacggagtattttcacatttcgacacgttgcgagacacgccccaaatctcttataatcggcggaataccaaccattcacggccaaaagttatccacaaattacatgtttgttattcacaatccagttatttcaacacgcgacacggtggataacttgtctaaaccagagtaaatattatctgttgtacgtatttcgccacagcgacagaaggggccacc

SEQ ID NO: 19 - DNA, 7383 bp, Bifidobacterium longum
  source 1..7383: mol_type = genomic DNA
ttcacatcgaatggctggacgataaggccccgatcggccgcggggtcgcccacaactgggtgagattcagccaggagtacatcgactacctgaaggacaagcccgtgccggtcgatcttcccaccgtggcgaagctctccagcccgatggccctggatgtctactggtggctgaccaaacgctactacaagatgcacgaccgcgtggatatcacctggaagcagctctacaaccagttcggcagcgactccaaggacatgttcaaattccgtcagaactttaggaaggctgttgattcagtgcttgaggtgtatccgcaggcacgaatcacctgcggaaggaactacgtgaccttgtggccgtccgaggtgtcagtgcccacggtctcccaggtgcgcagggtggagaagtcggccgagcgacggcgcgaggccgaggagggccactggactgccgtcgccggttacggcgaggtctacaccaccacggaattgtttgacgtgaccgccgcgcgtgatcacttcgacggcaccgtggaggcatcggaatgccgtttctgcgcgtttgacgcgcgcaaccgcgaacatcatgcgcggaacgcgggaaggctgttctagcggccgtgtccgcgcctctggggcggttgcgcgctccatgggtcgatctgccgctgttcggcctcccgctggcctgtgagcctgtccgtgcgctgtctgatctcgttgagcaggtcggccttggtcctgggggcctggcgtgattcgaacgggctggcctctccccagtcctcgggctcgctgaggtccagcggctcgtcgccgtctagcgtcctgattgataaccgacggaacgcagggaggaaccgatgaccaggagcgtcgaggagcagatggccgacatcgagcgccggatgaagcagctcagggcgcgcaaacagcgcatcgtggctagggagaacgccaaggcgcgcaagcggcgcacccatctgatcatccggctgggcggcatcctctccaacgagggcgtgcttggctacgacgagggcgtctggaacgacgagggcaaccggcaaaggctgctggacatgctcaaggcccatgccgccgaactgcgcgcatgggcctctgacgcgggcgtgaggctccccagcgctgagtcggcgggtgagctgcgggaacaggttcgtgacctgccccaagagcctcagatacaggagcagccgggctatggctaccagcccggattccaacagccacagcaatggcagcagcagccttggaactgagtcggtttcttctcttcatcggggcggagcccctttttatagaatcttttgtactcttttagactccccgcaggccttacggcagtaggggaaacgcactattaaaggggagaaaatgggagattaaaggggaggttttgggaattatttaggggaggttttgggagaataaaggacgcttttgaggaataaaaacgaggttttgggagaataaagggtagaaaatataaaaatctcgtttttatggtagaatgcagtcatgtccgatgagatcgtgaagtactcgaaccagttcaacaatcaggcgctgcgcaagttcaccgcgctcgatcttgatttgctgatggccatcgcgtctcgcgtgcgggacaagggcacggacgaggtggcgttcacgttcgaagaattgaagcggctggccggacttcagaggaacatgaccaacgatgagttcgccaagcagattgccaatgtgaaccgtcgcctgctcgcgctcaacttcgagttccagaacgaagagcacgacatcatccagttcgccctgttcgcaggcttcgtcaccagcccgaccaaacgcacactcaccgtatcggtgaactcgcgcttctcgttcctgcttaacgacctcacctcgcagttcacccgcttcgagctggccgagttcacggccctgcgctccagctacgccaaggagtgctacaggaggctcaagcagtaccgacaaaccggtgtgtggaaggtcagccttgaggacttccgccgactgctcgacgtacccaaatcgtatcggccgagcgaaatcaacaagtatgttcttaagccgattgaggaggagttggggcctctgctgaatctgaaggtgcatcgcaagtacctgaagaagaagccgggacgtggccgcgcttcccttgtcgggttcgaatttgaatttgacccggagaaggtacccggcggcgctcccgctccgcgcgtggagctgtccggctccgtggtgaccgatgaggcgaggaagtcgctcagggacgtgtcgaagacgcccgtgcccgatctgtcggtgccgggcgagggaccggcgctcgaccctgatactcaggcgttcctcgacgcgcacggcggtcatggattcgccggtgccgaggggtatgtctccgactggccgagtgctgcgtgatggtatgtgaaagcccgtccgggcttgcgctcggacgggccgggtgccgtttagcggctgtttctcatcgcccagacggccagggccgtgaggatgatgtccgcggcgatgggatgcaccgccggtgcgagacagacggcgatgaccgccatcagcaaatcaagatcgagcgcggtgaacttgcggcggaacgagccagggctgaactggatgcgtataaggcggcccacgatggtctgacaccattcgaggtggccagacgcagccatgattcacaggctatgcccgatgatcggatggagcctggtatcgagccgactcttttttgaacaaggggcctgccgcgggctccgacccgcggcaggttgcgccgtcaacggcggctggatgccatcgcccagacggccagggccgtcacggtgatgtcggccgcgatgggatccatcgcgggagcgaggcagatgacgatgaccgccatcagccatatccagggccggccgtgcggccccttgttacccatgcgcatgtgctgcgcctttcgttcgggccgcgccgcgactggcgcggcagcgtcgcccggcggatgccgggcggtcggttttcgtccctgctacaagacgtccatcgacgacgccaatcgtatcggctaagatggaaacgccggcggaggcgctgctaacttcccccttacgatcaggcgggcatgcatgacttttcggggatggccgatgccggcgggatgggttacccgccatcccctttgattgggccgtggccccgcgtcttcggatgcggggccggcgtcttcaaacaccaaccctttgcattactggtctgttcaatccaaggtccaagagctataatttccttgtcagacgcacgtctggcatacctaatcaagggggcaaaaatgttacgtaccaagcatttgaagatggcagtggttccaatgactctgctggcgctcctgtcgacggcagtcccggtggcatctgctcaagaaaccactgacgagtcgttctatgaacttaccaccactccgtcgggcggggacatgattgtcggcgaacctggcacaacgattctctttgattccagcaacggcgaattggtggacgtgctgccgccgagcgaggctgaagattattcggtaactgtctcgcgtggatgcgctgattccaatgctggatgctgggctggcgggatctctttgggtgacatgcagtttgcaggcaccggaacggcaacggggtcctggccgtatcgcaacagctatacgaccggcaataagtcgggacagatcaccttcgcaatcaatggagttacatacactcctgtcgcagctggtccgtggatgcgcatcgccacggcagacggctctggcgtcgacggcgtatccgttacccgctggtaaggatgtctttctaaatttcgggccggtgtcttcggatgccggccctttgcgttcccggcgttctcacaggccgagtccgtggcctcccgtgccccagcccatgccgatgttgagcgggtcggcggggtcggagaggtcccatgtctcctccatgtcgggttcggcctgtttttcggcctgtttgcgttcgttttcggccagccgctcgtcaagccgtgtcttgaacctgtcggtgagcgcctttttcgtcctgatgggcttcgggggttcctgcggggacggtgcgggccgtttcgtgtcctgcgtcgggttctccgcctgcgcgcgttgttcggccatacgcagtgcgagggccttcacctgttcggggcttggccgttcgttcccggcccgttcggcctgttcgagctgtttctccagttcggccacgagcctggtcctcggctgcatgtcgtggtcgtggatggccttggtggtcctcatgcggaacctgttggcctggtcccagtcggccgggatgtcggcgtcttcgagccacggcaccgccccgcgcagcctctcggactgctctccggccacctgctcggcgttccgcagcagcctgccgcgcttgaagatgttcgcgtccctggcctcgcgcgaggccgcccgcgccacgtcgatgatctgcttggcggcctcgtgctcctcggtgccgtggctcctccaccactcctcccggttcctcacgtcggccctcgcgtccatgagttttccgcggatcgcggccgtgtggtcggccttgtcggcttcgagctggcggcgcgcgtcgccctcgaagtagcgccagttcggttcggccggttccagccgcgcctggcgttggcgcagccgcccgatcttggcggcgaacagctcgcccaggcggtcgaatatccggttgagttcggtgcggatggcggtcagcagcctgttgctgcgcctgatctcacggttggcctcgcacctctcgctgacgcctccggcccgttcgatggccctggcggcgtatccctcgtggatggtgggttcgaggtcgctgccctggtcttcgaggctcctgtggtcgattctcgcggtctcgtccagccgcgcgttgcaggtgttcgcccaggactcgcgcagggccttgagcttggccttccggtcgagcgggttcagggacacgctcgtgcgcttccactgcctgcggccccgcttgtcggtcttctgcctgccggtctcggggtcgatcagcggaacccgctcgccccgctcgtccagcacgtactccatgcgctgcttgagccgggcccagccgcccgtggccgggtcgatctgccggttggcgacgaggatgtgcgcgtgcgggttgttgccccgcccgtcgtcgtggatggcgtaggtggccgcgtagccgtccgcgttcaggttctcgcggatgtactcctccagcgcctgcacgcgctgcctgggggtgaactcgcgcggcagggccacgacgatcttcttggccggcctcgccgtccggccggtctcgtgcagctcgaccgcgttgaacagcacggcggggtcggcgtactcggccggcgcgccctccggcagcagggtgccgacgcgcagcacgcgctccttgcgcccgtagtcgtaggtctcgccgcgacgctcgtcatgcacccgcctgccgctgatgtacgagagcgtggccgtggccttcgaaccgctcgcgcggctcacgttggagacggacagatggtagatcgccatcggcttcggctcctttcgtgatcggcgcgggcggcggggtgcggggcctcggccctgcggcaaggggttcccaggggtgcggcgagcacccccgggcctgccgggaggctcccccggaagggtgggaatccaaagggcaacgcccgtggcccccggagggcgcgcttacggaaaatgcaacctccggttgcatgtaagtgcgccctaatctttgattagggatttccttgctggtagaatcatatcaccatacggatgatgcagaccatgtaaggagccgtttcgatggtgaagagcctggatgagcagatcaagtccctgcaggagaggcaggcccagctcaaggcccgcgaggacgacctcagggcgcggcgcagggaacgcgaacgcaaggcccgcaccaagcgcctgatcgaggtcggcgcgatggccgagtcggccgcgggcttcgaggggagcgacgagagcgccaaggagcgcatagcccgcctcgtgcagctcggctcgctggtggaagccatgtgctccaccgacgtgatggacaactacacgagccgcgaggacctcaagaccaccgtcaccaaggccctggaacacaacgtcagaaccagcgatggcatgaactggaacctgcacgacctggtgtacgaggcgctgagcgaggaatggggcagaagggacggcgagatcagcgacctctgggcggacgacgggccaagcggataccagccaccctcatacgagccggtcaaccccgaacgcaggactccccaaacaccctccgatggcctgatctgacgtccaaaaaaaggcgccgtgcgccctttttaaatcttttaaaatctttttacattcttttaggccctccgcagcccttggaaacattgggctcagaggatgttactggggacaaaaggggagcgaactggggacaaaaagggagcgaactggggacaaaaagggagttgcatacacttttgcacctcaaaaggtgggaaaagcacctcatgttttcgattgattctctagtaagcgtctatgcgtatacgggggaccctctctcagccctactcccacaagggctgagagggtataaacctacctaaagcacctcaaaacctacctaaagcacctcaaaacctacctaaagcacctcaaccatacctaaagtacacaccgcaagtcgtgtactttaagtaggtcatggtagagtctacctaaagtacacggttaaaatcgttggaaactagaggaaacccccgcgaggctggcacctccgggggcgtggcaaccactgaacaggagtgattacgttgagtaattctaaggaactggacgtacccggcgagccgttcggcacgacggcgttcatcagctacatcatgtcgcaggtctccctgccctaccgccgccagacagccaaggagatcgtcaggcagcggggcagtctcgtcgtgaagtacgtcgccacgggcaaggcgctgccctacggcaagtacccaaggctcatggagatgtacgcctgcacgatgatcaaacgcggcgaccccagcttccaccccgacaccaggattctcgatctcggctcgtccttccgcgacttcctcaaaatgctgaacgttcccgtgggtggccgtcagcttcgaacgataaagccgcagcttgagaactacttcgccaccgccatcgcgatctcgaacaacacatcaagggaaaccgagatggccgggttcaccatcgccaccaagg
